(19) United States
(12) Patent Application Publication
(10) Pub. No.: US 2003/0134301 A1
(43) Pub. Date: Jul. 17, 2003

(54) Identification and use of molecules implicated in pain

(76) Inventors: Robert Alan Brooksbank, Cambridge (GB); Alistair Kerr Dixon, Cambridge (GB); Kevin Lee, Cambridge (GB); Robert Denham Pinnock, Ann Arbor, MI (US)

Correspondence Address: Mehdi Ganjeizadeh, Ph.D., Warner-Lambert Company, 2800 Plymouth Road, Ann Arbor, MI, 48105, US

(21) Appl. No.: 10/205,194

(22) Filed: Jul. 24, 2002

(30) Foreign Application Priority Data
Feb. 7, 2002 (GB) 0202880.1
Jul. 27, 2001 (GB) 0118354.0

(51) Int. Cl. G01N 33/00; C12Q 1/68; G01N 33/53; G01N 33/567; C12N 9/12

(52) U.S. Cl. 435/6; 800/3; 435/7.1; 435/7.21; 435/194

(57) ABSTRACT

The invention relates to the use of:

(a) an isolated gene sequence that is down-regulated in the spinal cord in response to streptozocin-induced diabetes;

(b) an isolated gene sequence comprising a nucleic acid sequence of Tables I to X.

(c) an isolated gene sequence having at least 80% sequence identity with a nucleic acid sequence of Tables I to X;

(d) an isolated nucleic acid sequence that is hybridizable to any of the gene sequences according to (a), (b) or (c) under stringent hybridisation conditions;

(e) a recombinant vector comprising a gene sequence or nucleic acid sequence according to any one of (a) to (d);

(f) a host cell containing the vector according to (e);

(g) a non-human animal having in its genome an introduced gene sequence or nucleic acid sequence or a removed or down-regulated gene sequence or nucleic acid sequence according to any one of (a) to (d);

(h) an isolated polypeptide comprising an amino acid sequence at least 90% identical to an amino acid sequence encoded by a nucleotide sequence according to any one of (a) to (d), or a polypeptide variant thereof with sequential amino acid deletions from the C terminus and/or the N-terminus; or

(i) an isolated polypeptide encoded by a nucleotide sequence according to any one of (a) to (d); or

(k) an isolated antibody that binds specifically to a polypeptide according to (h) or (i);

in the screening of compounds for the treatment of pain, or for the diagnosis of pain.

The invention also relates to the use of naturally occurring compounds such as peptide ligands of the expression products of the above gene sequences and their associated signal transduction pathways for use in the treatment of pain.

[0001] This application claims the priority of United Kingdom application NO. 0118354.0, filed Jul. 27, 2001, and United Kingdom application NO. 0202880.1, filed Feb. 7, 2002; the entire contents of which applications are hereby incorporated by reference herein.

### FIELD OF THE INVENTION

[0002] The present invention relates to nucleic acids, their expression products and pathways involved in pain, and their use in screening for molecules that can alleviate pain. The invention further relates to methods for the assay and diagnosis of pain in patients.

### BACKGROUND TO THE INVENTION

[0003] Pain is currently classified into four general types. Post-operative acute pain can be successfully treated with existing pain medications of e.g. the opioid and non-steroidal anti-inflammatory (NSAID) types, and is usually short-term and self-limiting. A second type of pain, present e.g. in cancer and arthritis, is also responsive to medication initially with a NSAID and in its later stages with opioids. Neuropathic pain arises from damage to the central or peripheral nerve systems, and is more effectively treated with antidepressants or anticonvulsants. A fourth type of pain called central sensitization results from changes in the central nervous system as a result of chronic pain, these changes often being irreversible and difficult to treat. Nerve pain from shingles or diabetes falls into this and the neuropathic category. Changes occur where pain is at first poorly controlled and gradually progress to the point where a person is sensitive to stimuli which would not normally cause pain, for example a light touch. People with pain of this kind often describe a widening of the pain area to include areas which had originally not been injured or which were thought not to be involved in pain. This classification is, however based on clinical symptoms rather than on the underlying pain mechanisms.

[0004] Opiates such as morphine belong to a traditional class of pain-relieving compounds that are now recognized as binding to opiate receptors. Naturally occurring polypeptides have also been found to have opiate-like effects on the central nervous system, and these include β-endorphin, met-enkephalin and leu-enkephalin.

[0005] Salicin was isolated at the beginning of the 19th century, and from that discovery a number of NSAIDs such as aspirin, paracetamol, ibuprofen, flurbiprofen and naproxen were developed. NSAIDs are by far the most widely used pain-relieving compounds, but can exhibit side effects, in particular irritation of the GI tract that can lead to the formation of ulcers, gastrointestinal bleeding and anaemia.

[0006] Interest in the neurobiology of pain is developing: see a colloquium sponsored by the US National Academy of Sciences in December 1998 concerning the neurobiology of pain and reviewed in The Scientist 13[1], 12, 1999. Many pain mechanisms were discussed including the role of the capsaicin receptors in pain, (M. J. Caterina et al., Nature, 389, 816-824, 1997). Large dosages of capsaicin were reported to disable that receptor, (W. R. Robbins et al., Anesthesia and Analgesia, 86, 579-583, 1998). Additionally, a tetrodotoxin-resistant sodium channel found in small diameter pain-sensing neurons (PN3) was discussed (A. N. Akopian et al., Nature, 379, 257-262, 1986) and L. Sangameswaran et al., Journal of Biological Chemistry, 271, 953-956, 1996). Its involvement in transmission and sensitization to pain signals has been reported, (S. D. Novakovic et al., Journal of Neuroscience, 18, 2174-2187, 1998). A further tetrodotoxin-resistant sodium channel has been reported (S. Tate et al., Nature Neuroscience, 1, 653-655 1998).

[0007] Second messenger systems have also been shown to be important since knockout-mice lacking protein kinase C (PKC) γ were reported to respond to acute pain e.g. from a hot surface, but not to respond to neuropathic pain when their spinal nerves are injured (Malmberg et al., Science, 278, 279-283 (1997).

[0008] Present methods for identifying novel compounds that relieve pain of one or more of the types indicated above suffer from the defect that they are dependent either on the relatively limited number of receptors known to be involved in pain or on the empirical identification of new receptors which is an uncertain process. In relation to known receptors, for example the opioid receptor, research directed to improved compounds offers the possibility of searching compounds that have a better therapeutic ratio and fewer side effects. Thist does not lead naturally to compounds for different pain receptors that have new modes of action and new and qualitatively different benefits. Even when newly identified additional receptors are taken into account, known receptors revolve around tens of gene products. However, there are between 30,000 and 40,000 genes in the genome of an animal and more of them are concerned with nervous system function than with peripheral function. We therefore concluded that a large number of receptors and pathways are important to the transduction of pain, but up to now have remained unknown.

### SUMMARY OF THE INVENTION

[0009] It is an object of the invention to provide sequences of genetic material for which no role in pain has previously been disclosed, and which are useful, for example, in:

[0010] identifying metabolic pathways for the transduction of pain

[0011] identifying from said metabolic pathways compounds having utility in the diagnosis or treatment of pain

[0012] producing proteins and polypeptides with a role in the transduction of pain;

[0013] producing genetically modified non-human animals that are useful in the screening of compounds for the treatment or diagnosis of pain.

[0014] Identifying ligand molecules for said receptors involved in metabolic pathways and having utility in the treatment of pain.

[0015] It is yet a further object of the invention to provide non-human animals and microorganisms that can be used in screening compounds for pharmacological activity, especially pain-reducing activity.

[0016] In one aspect, the invention relates to the use in the screening of compounds that are effective in the treatment of pain, or in the diagnosis of pain, of:

[0017] (a) an isolated gene sequence that is down regulated in the spinal cord of a mammal in response to streptozocin-induced diabetes;

[0018] (b) an isolated gene sequence having at least 80% sequence identity with the nucleic acid sequences of Tables I-X

[0019] (c) an isolated nucleic acid sequence comprising a sequence that is hybridizable to any of the gene sequences according to (a) or (b) under stringent hybridisation conditions;

[0020] (d) a recombinant vector comprising any of the gene sequences according to (a) to (c);

[0021] (e) a host cell containing the vector according to (d);

[0022] (f) a non-human animal, for use in the screening of compounds that are effective in the treatment of pain, or in the diagnosis of pain, having in its genome an introduced gene sequence or a removed or down-regulated nucleotide sequence, said sequence becoming down-regulated in the spinal cord of a mammal in response to streptozocin-induced diabetes;

[0023] (g) an isolated polypeptide containing an amino acid sequence at least 90% identical to an amino acid sequence encoded by a nucleic acid sequence according to any one of (a) to (d), or a polypeptide variant thereof with sequential amino acid deletions from the C terminus and/or the N-terminus; or

[0024] (h) an isolated antibody that binds specifically to the isolated polypeptide according to (g).

[0025] The invention also relates to the use of naturally occurring compounds such as peptide ligands of the expression products of the above gene sequences and their associated signal transduction pathways for the treatment of pain.

### DESCRIPTION OF PREFERRED EMBODIMENTS

[0026] Definitions

[0027] Within the context of the present invention:

[0028] “Comprising” means consisting of or including. Thus nucleic acid comprising a defined sequence includes nucleic acid that may contain a full-length gene or full-length cDNA. The gene may include any of the naturally occurring regulatory sequencers), such as a transcription and translation start site, a promoter, a TATA box in the case of eukaryotes, and transcriptional and translational stop sites. Further, a nucleic acid sequence comprising a cDNA or gene may include any appropriate regulatory sequences for the efficient expression thereof in vitro

[0029] “Isolated” requires that the material be removed from its original environment (e.g. the natural environment if it is naturally occurring). For example, a naturally occurring polynucleotide or a peptide present in a living animal is not isolated, but the same polynucleotide or peptide, separated from some or all of the coexisting materials in the natural system, is isolated. Such polynucleotide can be part of a vector and/or such polynucleotide or peptide can be part of a composition, and still be isolated in that the vector or composition is not a part of its natural environment.

[0030] “Purified” does not require absolute purity; instead it is intended as a relative definition. Purification of starting materials or natural materials from their natural environment to at least one order of magnitude, preferably two or three orders, and more preferably four or five orders of magnitude is expressly contemplated.

[0031] “Nucleic acid sequence” or “gene sequence” means a sequence of nucleotides or any variant or homologue thereof, or truncated or extended sequence thereof, and is preferably indicated by a Genebank accession number. Also within the scope of the present invention are down-regulated nucleic acid sequences which encode expression products which are components of signaling pathways. This invention also includes any variant or homologue or truncated or extended sequence of the down-regulated nucleotide sequence. Also within the scope of the present invention, the term “nucleic acid(s) product”, or “expression product” or “gene product” or a combination of these terms refers without being biased, to any, protein(s), polypeptide(s), peptide(s) or fragment(s) encoded by the up-regulated nucleotide sequence.

[0032] “Operably linked” refers to a linkage of polynucleotide elements in a functional relationship. For instance, a promoter or an enhancer is operably linked to a coding sequence if it regulates the transcription of the coding sequence. In particular, two DNA molecules (such as a polynucleotide containing a promoter region and a polynucleotide encoding a desired polypeptide) are said to be “operably linked” if the nature of the linkage between the two polynucleotides does not (1) result in the introduction of a frame-shift mutation and (2) interfere with the ability of the polynucleotide containing the promoter to direct the transcription of the coding polynucleotide.

[0033] “Pain” includes chronic pain and in particular diabetic pain.

[0034] “Stringent hybridization conditions” is a recognized term in the art and for a given nucleic acid sequence refers to those conditions which permit hybridization of that sequence to its complementary sequence and closely homologous sequences. Conditions of high stringency may be illustrated in relation to filter-bound DNA as for example 2×SCC, 65° C. (where SSC=0.15M sodium chloride, 0.015M sodium citrate, pH 7.2), or as 0.5M NaHPO₄, 7% sodium dodecyl sulfate (SDS), 1 mM EDTA, at 65° C., and washing in 0.1×SCC/0.1% SDS at 68° C. (Ausubel F. M. et al., eds, 1989, Current Protocols in Molecular Biology, Vol. I, Green Publishing Associates, Inc., and John Wiley & Sons Inc., New York, at p. 2. 10.3). Hybridization conditions can be rendered highly stringent by raising the temperature and/or by the addition of increasing amounts of formamide, to destabilize the hybrid duplex of non-homologous nucleic acid sequence relative to homologous and closely homologous nucleic acid sequences. Thus, particular hybridisation conditions can be readily manipulated, and will generally be chosen depending on the desired results.

[0035] “Variants or homologues” include (a) sequence variations of naturally existing gene(s) resulting from polymorphism(s), mutation(s), or other alteration(s) as compared to the above identified sequences, and which do not deprive the encoded protein of function (b) recombinant DNA molecules, such as cDNA molecules encoding genes indicated by the relevant Genebank accession numbers and (c) any sequence that hybridizes with the above nucleic acids under stringent conditions and encodes a functional protein or fragment thereof.

[0036] “Gene product” refers to polypeptide—which is interchangeable with the term protein—which is encoded by a nucleotide sequence and includes single-chain polypeptide molecules as well as multiple-polypeptide complexes where individual constituent polypeptides are linked by covalent or non-covalent means. Polypeptides of the present invention may be produced by synthetic means (e.g. as described by Geysen et al., 1996) or by recombinant means.

[0037] The terms “variant”, “homologue”, “fragment”, “analogue” or “derivative” in relation to the amino acid sequence for the polypeptide of the present invention includes any substitution of, variation of, modification of, replacement of, deletion of or addition of one (or more) amino acid from or to the sequence providing the resultant polypeptide has the native gene product activity. In particular, the term “homologue” covers homology with respect to structure and/or function. With respect to sequence homology, there is at least 90%, more preferably at least 95% homology to an amino acid sequence encoded by the relevant nucleotide sequence shown in Tables I-X, preferably there is at least 98% homology.

[0038] Typically, for the variant, homologue or fragment of the present invention, the types of amino acid substitutions that could be made should maintain the hydrophobicity/hydrophilicity of the amino acid sequence. Amino acid substitutions may include the use of non-naturally occurring amino acid analogues.

[0039] In addition, or in the alternative, the protein itself could be produced using chemical methods to synthesize a polypeptide, in whole or in part. For example, peptides can be synthesized by solid phase techniques, cleaved from the resin, and purified by preparative high performance liquid chromatography (e.g. Creighton (1983) Proteins Structures and Molecular Principles, W H Freeman and Co., New York, N.Y., USA). The composition of the synthetic peptides may be confirmed by amino acid analysis or sequencing (e.g. the Edman degradation procedure).

[0040] Direct peptide synthesis can be performed using various solid-phase techniques (Roberge J Y et al Science Vol 269 1995 202-204) and automated synthesis may be achieved, for example, using the ABI 431 A Peptide Synthesizer (Perkin Elmer) in accordance with the instructions provided by the manufacturer. Additionally, the amino acid sequence of a gene product, or any part thereof, may be altered during direct synthesis and/or combined using chemical methods with a sequence from other subunits, or any part thereof, to produce a variant polypeptide.

[0041] In another embodiment of the invention, a gene product natural, modified or recombinant amino acid sequence may be ligated to a heterologous sequence to encode a fusion protein. For example, for screening of libraries for compounds and peptide agonists and antagonists of gene product activity, it may be useful to encode a chimeric gene product expressing a heterologous epitope that is recognised by a commercially available antibody. A fusion protein may also be engineered to contain a cleavage site located between a gene product sequence and the heterologous protein sequence, so that the gene product may be cleaved and purified away from the heterologous moiety.

[0042] The gene product may also be expressed as a recombinant protein with one or more additional polypeptide domains added to facilitate protein purification. Such purification facilitating domains include, but are not limited to, metal chelating peptides such as histidine-tryptophan modules that allow purification on immobilised metals (Porath J, Protein Expr Purif Vol 3 1992 p263-281), protein A domains that allow purification on immobilised immunoglobulin, and the domain utilised in the FLAGS extension/affinity purification system (Immunex Corp, Seattle, Wash., USA). The inclusion of a cleavable linker sequence such as Factor XA or enterokinase (Invitrogen, San Diego, Calif., USA) between the purification domain and the gene product is useful to facilitate purification.

[0043] Identified Sequences

[0044] The inventors have identified nucleotide acid sequences that give rise to expression products listed in the Tables I-X that are down regulated in the spinal cord in response to streptozocin-induced diabetes and are believed to be involved in the transduction of pain. However, they have not been found to be down-regulated in a chronic constrictive injury (CCI) model of pain. These nucleic acid sequences have not previously been implicated in the transduction of pain. In Tables I-X, * denotes more preferred nucleic acid sequences and ** denotes most preferred nucleic acid sequences.

[0045] The validity of the present experimental procedure was confirmed by the fact that nucleotide sequences were obtained as a result of the investigation whose function in the transduction of pain has been previously confirmed and established. These nucleic acid sequences are not part of this invention. Any of the nucleic acid sequences and expression products can be used to develop screening technologies for the identification of novel molecules for the prevention or treatment of pain. These screening technologies could also be used to ascribe new pain therapeutic indications to molecules that have not previously been identified as being useful for the prevention or treatment of pain. Furthermore, the said nucleic acid sequences can be used as diagnostic tools and for the development of diagnostic tools.

TABLE I
Sequences whose expression products are kinases

| Expression | Rat | Mouse | Human | | |
|---|---|---|---|---|---|
| product or name | Accession | accession | Accession | | |
| (Ref) | Number | number | Number | Reaction | Assay |
| Putative DNA | | D87521 | | Recombination | Ser/Thr kinase |
| dependent protein | | (SEQ ID | | and | |
| kinase catalytic | | No's 1-2) | | DNA repair | |
| subunit (Ref: 1) | | | | | |
| Putative cAMP- | AJ278429 | | | Regulatory | Kinase |
| dependent protein | (SEQ ID | | | subunit | |
| kinase regulatory | No's 3-4) | | | | |
| subunit RI alpha* | | | | | |
| (Ref: 2) | | | | | |
| Putative protein | | | U38894 | N/A | receptor tyrosine |
| tyrosine kinase | | | (SEQ ID | | kinase |
| t-Ror1 (Ref: 3) | | | NO's 5-6) | | |
| Diacylglycerol | D78588 | | U51477 | Diacylglycerol | kinase |
| kinase | (SEQ ID | | | activity | |
| (DGK-IV)* | No's 7-8) | | | | |
| (Ref: 4) | | | | | |
| Elk protein | X13411 | | | N/A | receptor |
| tyrosine kinase* | (SEQ ID | | | | tyrosine kinase |
| (Ref: 5) | No's 9-10) | | | | |

[0046] TABLE II
Sequences whose expression products are phosphatases

| Expression | Rat | Mouse | Human | | |
|---|---|---|---|---|---|
| product or name | accession | accession | Accession | | |
| (Ref) | number | number | Number | Reaction | Assay |
| PP-1 alpha for | D00859 | U25809 | X70848 | Ser/Thr | Phosphatase |
| catalytic subunit | (SEQ ID | | | phosphatase | |
| of protein | NO's 11-12 | | | | |
| phosphatase | | | | | |
| type 1 alpha (Ref: 6) | | | | | |
| Protein tyrosine | S49400 | U28216 | U27831 | Cell | Non-receptor |
| phosphatase, | (SEQ ID | | | signalling | Tyr |
| striatum enriched | No's 13-14) | | | | |
| (Ref: 7) | | | | | |

[0047] TABLE III
Sequences whose expression products are ion channel proteins

| EXPRESSION | RAT | MOUSE | HUMAN | |
|---|---|---|---|---|
| PRODUCT | ACCESSION | ACCESSION | ACCESSION | |
| (Refs) | NUMBER | NUMBER | NUMBER | REACTION |
| Na⁺, K⁺-ATPase | D00189 | | | Membrane |
| alpha-subunit (Ref: 8) | (SEQ ID No's | | | potential |
| | 15-16) | | | |
| Voltage dependent | AF268468 | U30838 | L06328 | N/A |
| anion channel 2 * | (SEQ ID No's | | | |
| (Ref: N/A) | 17-18) | | | |

[0048] TABLE IV
Sequences whose expression products are receptors

| | | Mouse | Human | | |
|---|---|---|---|---|---|
| Expression Product or | Rat Accession | accession | Accession | | |
| Name | Number | Number | Number | Reaction | Assay |
| Neonatal glycine | X57281 | | | Glycinegated | N/A |
| receptor NglyR* | (SEQ ID | | | Cl-channels | |
| (Ref: 9) | No's 19-20) | | | in | |
| | | | | Xenopus | |
| | | | | oocyte | |
| Syntaxin 13* | AF044581 | | | Neurite | SNARE |
| (Ref: 10) | (SEQ ID | | | outgrowth | |
| | NO's 21-22) | | | and | |
| | | | | endosomal | |
| | | | | trafficking | |

[0049] TABLE V
Sequences whose expression products are transporters

| Expression | Rat | Mouse | Human | | |
|---|---|---|---|---|---|
| Product or | Accession | Accession | Accession | | |
| Name | Number | Number | Number | Reaction | Assay |
| ATPase, calcium, | J03753 | | | Calcium | Calcium |
| plasma | (SEQ ID | | | transport | |
| membrane, | No's 23-24) | | | across | |
| isoform 1 | | | | plasma | |
| (Ref: 11) | | | | membrane | |
| Calcium | AF209196 | | | Calcium | Calcium |
| transporter CaT2 | (SEQ ID | | | transport | |
| (Ref: 12) | No's 25-26) | | | across | |
| | | | | plasma | |
| | | | | membrane | |
| Carnitine/acyl-carnitine | X97831 | | | Fatty acid | N/A |
| carrier | (SEQ ID | | | metabolism | |
| protein (Ref: 13) | No's 27-28) | | | | |
| Putative potent | | AB012808 | AB040056 | Transmembrane | Transporter |
| brain type organic | | | (SEQ ID No's | transport | |
| ion transporter | | | 29-30) | | |
| (Ref: N/A) | | | | | |
| UDP-galactose | D87991 | | | Nucleotide-sugar | transporter |
| transporter | (SEQ ID | | | transporter | |
| (Ref: 14) | No's 31-32) | | | | |
| Choline | X66494 | | | Neurotransmitter | Choline |
| transporter | (SEQ ID | | | release | |
| CHOT1** | No's 33-34) | | | | |
| (Ref: 15) | | | | | |

[0050] TABLE VI
Sequences whose expression products are G-protein
coupled receptor proteins

| Expression | Rat | Mouse | Human | | |
|---|---|---|---|---|---|
| product or | Accession | Accession | Accession | | |
| Name | Number | Number | Number | Reaction | Assay |
| Rab GDI, | X74402 | | | G-protein | N/A |
| alpha | | | | | |
| species, ras | (SEQ ID | | | | |
| related | NO's | | | | |
| GTPase | 35-36) | | | | |
| (Ref: 16) | | | | | |

[0051] TABLE VII
Sequences whose expression products are DNA-binding proteins

| Expression | Rat | Mouse | Human | | |
|---|---|---|---|---|---|
| Product or | Accession | Accession | Accession | | |
| Name | Number | Number | Number | Reaction | Assay |
| Histone, core, | M99065 | | | DNA binding | DNA binding |
| H2A.1 | (SEQ ID | | | | |
| (Ref: 17) | No's 37-38) | | | | |
| Putative signal | | U06924 | | Transcription | DNA binding |
| transducer and | | (SEQ ID | | factor | |
| regulator | | No's 39-40) | | | |
| transcription 1 | | | | | |
| (Stat1) (Ref: 18) | | | | | |
| Transcription | L28801 | | | RNA synthesis | DNA binding |
| factor IIIC, alpha | (SEQ ID | | | | |
| subunit (Ref: 19) | No's 41-42) | | | | |

[0052] TABLE VIII
Sequences whose expression products are proteases

| Expression | Rat | Mouse | Human | | |
|---|---|---|---|---|---|
| Product or | Accession | Accession | Accession | | |
| Name | Number | Number | Number | Reaction | Assay |
| Putative Lon | | | X76040 | Endopeptidase | peptidase |
| proteinase (Ref: 20) | | | (SEQ ID No's | | |
| | | | 43-44) | | |

[0053] TABLE IX
Sequences whose expression products are other enzymes

| Expression | Rat | Mouse | Human | | |
|---|---|---|---|---|---|
| product or | Accession | Accession | Accession | | |
| Name | Number | Number | Number | Reaction | Assay |
| GM3 synthase | AB018049 | | | Ganglioside | Ligase |
| (Ref: N/A) | (SEQ ID | | | synthesis | |
| | No's 45-46) | | | | |
| Enolase, neuron-specific | M11931 | | | Glycolysis | Lyase |
| (Ref: 21) | (SEQ ID | | | | |
| | No's 47-48) | | | | |
| Putative carbonic | | AB005450 | | Acid-base | Lyase |
| anhydrase XIV | | (SEQ ID | | balance | |
| (Ref: 22) | | No's 49-50) | | | |
| Cytosolic malate | AF093773 | M29462 | D55654 | Carbohydrate | Oxidoreductase |
| dehydrogenase | (SEQ ID | | | metabolism | |
| (Mdh)* (Ref: N/a) | NO's 51-52) | | | | |
| Heme-binding | D30035 | | | N/A | Oxidoreductase |
| protein (HBP23) | (SEQ ID | | | | |
| (Ref: 23) | No's 53-54) | | | | |
| Squalene | D37920 | | | Sterol | Oxidoreductase |
| epoxidase* | (SEQ ID | | | biosynthesis | |
| (Ref: 24) | No's 55-56) | | | | |
| Superoxide | M21060 | X05634 | K00065 | Destroying | Oxidoreductase |
| dismutase, | (SEQ ID | | | radicals | |
| copper-zinc | No's 57-58) | | | | |
| (SOD-1) | | | | | |
| (REF: 25) | | | | | |
| Aspartate | J04171 | | | Amino acid | Transferase |
| aminotransferase, | (SEQ ID | | | metabolism | |
| cytosolic* | No's 59-60) | | | | |
| (Ref: 26) | | | | | |
| Branched-chain | AF165887 | | | Amino acid | Transferase |
| aminotransferase, | (SEQ ID | | | metabolism | |
| cytosolic, brain | No's 61-62) | | | | |
| (Ref: 27) | | | | | |
| Dihydrolipoamide | D90401 | | | TCA cycle | Transferase |
| succinyl-transferase | SEQ ID | | | | |
| (Ref: 28) | NO's 63-64) | | | | |
| RNA | AB017711 | | | Transcription | Transferase |
| polymerase II | (SEQ ID | | | | |
| (Ref: 29) | NO's 65-66) | | | | |
| Squalene | M95591 | | | Isoprene and | Transferase |
| synthetase, | (SEQ ID | | | cholesterol | |
| hepatic (Ref: 30) | No's 67-68) | | | biosynthesis | |
| UDP-Gal: | AF048687 | | | Lactosyl-ceramide | Transferase |
| glucosylceramide | (SEQ ID | | | synthesis | |
| beta-1,4-galactosyl | No's 69-70) | | | | |
| transferase (Ref: 31) | | | | | |

[0054] TABLE X
Miscellaneous sequences

| Expression product | | Mouse | | |
|---|---|---|---|---|
| or | Rat Accession | Accession | Human Accession | |
| Name | Number | Number | Number | Reaction |
| Microtubule- | U05784 | | | Cytoskeleton |
| associated proteins 1A | (SEQ ID No's | | | protein |
| and !B light chain | 71-72) | | | |
| subunit 3 | | | | |
| (Ref: 32) | | | | |
| Putative MD6 | | X54352 | | Unknown |
| (Ref: N/A) | | (SEQ ID No's | | |
| | | 73-74) | | |
| Ribosomal protein L3 | X62166 | | | Protein synthesis |
| (Ref: 33) | (SEQ ID No's | | | |
| | 75-76) | | | |
| Ribosomal protein S4 | X14210 | M73436 | M58458 | Protein synthesis |
| (Ref: 34) | (SEQ ID No's | | | |
| | 77-78) | | | |
| Synaptic vesicle | AF060174 | Synaptic vesicle | | Unknown |
| protein 2C (Ref: 35) | (SEQ ID No's | protein 2C | | |
| | 79-80) | | | |
| Putative ARL-6 | | AF223953 | | Unknown |
| interacting protein-1 | | (SEQ ID No's | | |
| (Ref: 36) | | 81-82) | | |
| Ribosomal protein | X94242 | | | Protein synthesis |
| L14 (Ref: 37) | (SEQ ID No's | | | |
| | 83-84) | | | |
| Putative dynactin light | ) | AF098508 | | Cytoskeleton |
| chain (P24) | | (SEQ ID No's | | |
| (Ref: 38) | | 85-86) | | |
| Ubiquitin/ribosomal | X82636 | AF118042 | | |
| protein L40, fusion | (SEQ ID No's | | | |
| protein (Ref: 39) | 87-88) | | | |
| Cadherin PB, short | D83349 | | | Cell adhesion |
| type (Ref: 40) | (SEQ ID No's | | | |
| | 89-90) | | | |
| Guanine nucleotide- | AF022088 | | | Cell signalling |
| binding protein, γ-3 | (SEQ ID No's | | | |
| subunit (Ref: 41) | 91-92) | | | |
| Actin, γ, cytoplasmic | X52815 | | | Cytoskeleton |
| (Ref: 42) | (SEQ ID No's | | | protein |
| | 93-94) | | | |
| Chimaerin, β (bch) | L07494 | | | Cell signalling |
| (Ref: 43) | (SEQ ID No's | | | |
| | 95-96) | | | |
| Parvalbumin | M12725 | | X63070 | Ca²⁺ buffer |
| (Ref: 44) | (SEQ ID No's | | | |
| | 97-98) | | | |
| Putative BAP 31 | | X81816 | | Unknown |
| (Ref: 45) | | (SEQ ID No's | | |
| | | 99-100) | | |
| Putative | U88550 | | | Neural |
| protocadherin 2C | (SEQ ID No's | | | development |
| (Ref: 46) | 101-102) | | | |
| Ribosomal protein 112 | X53504 | L04280 | L06505 | Protein synthesis |
| (Ref: 47) | (SEQ ID No's | | | |
| | 103-104) | | | |
| Putative cell surface | | D26483 | | Unknown |
| glycoprotein A15(PE | | (SEQ ID No's | | |
| 15) gene (Ref: N/A) | | 105-106) | | |
| Putative translation | | U70733 | | Protein synthesis |
| initiation factor elF3- | | (SEQ ID No's | | |
| p44(Ref: N/A) | | 107-108 | | |
| Putative tumor | | U52945 | | Unknown |
| susceptibility tsg101 | | (SEQ ID No's | | |
| gene (Ref: 48) | | 109-110) | | |
| Thymosin β 4, spleen | M34043 | U38967 | D85181 | Unknown |
| (Ref: 49) | (SEQ ID No's | | | |
| | 111-112) | | | |
| Ribosomal protein | M20156 | | | Protein synthesis |
| L18 (Ref: 50) | (SEQ ID No's | | | |
| | 113-114) | | | |
| Putative activation of | | AB024303 | | |
| Sentrin/SUMO | | (SEQ ID No's | | |
| protein AOS1 | | 115-116) | | |
| (Ref N/A) | | | | |
| 190 kDa ankyrin | AF069525 | | | Cytoskeleton |
| isoform (Ref: 51) | (SEQ ID No's | | | protein |
| | 117-118) | | | |
| Synaptotagmin | U63740 | | U69139 | Axonal outgrowth |
| interacting protein | (SEQ ID No's | | | |
| zygin 1 (Ref: N/A) | 119-120) | | | |
| Prion-related protein | M20313 | | | Cell signalling |
| (PrP) (Ref: 52) | (SEQ ID No's | | | |
| | 121-122) | | | |
| Ribosomal protein | X15013 | | | Protein synthesis |
| L7a (Ref: 53) | (SEQ ID No's | | | |
| | 123-124) | | | |
| Astrocyte and | U33472 | | | Unknown |
| olefactroy-limbic | (SEQ ID No's | | | |
| associated, type 1 | 125-126) | | | |
| (Ref: 54) | | | | |
| C1-13 protein | X52817 | | | Unknown |
| neuronal-specific | (SEQ ID NO's | | | |
| (Ref: 55) | 127-128) | | | |
| Calnexin | L18889 | | | Protein production |
| (Ref: 56) | (SEQ ID No's | | | |
| | 129-130) | | | |
| Enkephalin (Enk), | Y07503 | | | Neurotransmitter |
| prepro ** (Ref: 57) | (SEQ ID No's | | | |
| | 131-132) | | | |
| f-spondin (Ref: 58) | M88469 | | | Neurite extension, |
| | (SEQ ID No's | | | neural cell adhesion |
| | 133-134) | | | |
| Neurofilament 68 kDa | X53981 | | | Cytoskeleton |
| (Ref: 59) | (SEQ ID No's | | | |
| | 135-136) | | | |
| Putative E800 | | Y10968 | | Unknown |
| (Ref: 60) | | (SEQ ID No | | |
| | | 137) | | |
| Putative F-actin | | | U56637 | Cytoskeleton |
| capping protein α-1 | | | (SEQ ID No's 138-139) | protein |
| subunit (CAPZ) | | | | |
| (Ref: 61) | | | | |
| Putative KIAA0456 | | | AB007925 | Unknown |
| (Ref: 62) | | | (SEQ ID No's 140-141) | |
| Putative potassium | | | AF155652 | K⁺ current |
| channel modulatory | | | (SEQ ID No's 142-143) | modulator |
| factor (Ref: N/A) | | | | |
| Putative RNA1 | | U08110 | | Unknown |
| homolog | | (SEQ ID NO's | | |
| (Ref: 63) | | 144-145) | | |
| Putative Sec 62 gene | | | U93239 | Protein |
| (Ref: 64) | | | (SEQ ID No's 146-147) | translocation |
| Putative TCP-1- | | U05333 | | protein folding |
| chaperonin cofactor A | | (SEQ ID No's | | |
| (Ref: 65) | | 148-149) | | |
| Putative U6 sn-RNA | | | AF182290 | Nucleic acid |
| associated Sm-like | | | (SEQ ID No's 150-151) | splicing |
| protein (Ref: N/A) | | | | |
| Putative vitiligo | | AF031087 | | Unknown |
| associated protein | | (SEQ ID No's | | |
| VIT-1 (Ref: 66) | | 152-153) | | |
| Glypican | L02896 | | | Heparan sulphate |
| (Ref: 67) | (SEQ ID No's | | | glycoprotein |
| | 154-155) | | | |
| Putative Ndr1 gene | | U60593 | | Unknown |
| (Ref: 68) | | (SEQ ID No's | | |
| | | 156-157) | | |
| Ribosomal protein | X77398 | | | protein synthesis |
| S23 (Ref: 69) | (SEQ ID No's | | | |
| | 158-159) | | | |
| Putative DNA- | M19393 | M33330 | J02984 | Protein synthesis |
| binding protein | (SEQ ID No's | | | |
| insulinoma rig | 160-161) | | | |
| (Ref: 70) | | | | |
| G9 surface | X76489 | | | Unknown |
| glycoprotein, platelet | (seq id No's | | | |
| (Ref: 71) | 162-163) | | | |
| Foocen-m2 reticulon | AF132045 | | | Inhibits neurite |
| gene (Ref: N/A) | (SEQ ID No's | | | outgrowth |
| | 164-165 | | | |
| Clusterin | M16975 | | | Unknown |
| (Ref: 72) | (SEQ ID No's | | | |
| | 166-167) | | | |
| Prosaposin (Ref 77) | S18373 (SEQ | | | Sphingolipid |
| | ID 176, 177) | | | degradation |
| Putative nuclear | | | AJ000644 | Unknown |
| speckle-type protein | | | (SEQ ID No's 168-169) | |
| (Ref: 73) | | | | |
| Putative OCP-2 | | | L49173 | Unknown |
| (Ref: 74) | | | (SEQ ID No's 170-171) | |
| Putative NS1-binding | | | AJ012449 | Inknown |
| protein (NS1-BP) | | | (SEQ ID No's | |
| (Ref: 75) | | | 172-173) | |
| Tubulin, α | V01227 | M13446 | K00558 | Cytoskeleton |
| (Ref: 76) | (SEQ ID No's | | | protein |
| | 174-175 | | | |

[0055] Production of Polypeptides and Nucleic Acids

[0056] Vectors

[0057] Recombinant expression vectors can be employed to express any of the nucleic acid sequences of the invention. The expression products derived from such vector constructs can be used to develop screening technologies for the identification of molecules that can be used to prevent or treat pain, and in the development of diagnostic tools for the identification and characterization of pain. The expression vectors may also be used for constructing transgenic non-human animals.

[0058] Gene expression requires that appropriate signals be provided in the vectors, said signals including various regulatory elements such as enhancers/promoters from viral and/or mammalian sources that drive expression of the genes or nucleic acid sequences of interest in host cells. The regulatory sequences of the expression vectors used in the invention are operably linked to the nucleic acid encoding the pain-associated protein of interest or a peptide fragment thereof.

[0059] Generally, recombinant expression vectors include origins of replication, selectable markers, and a promoter derived from a highly expressed gene to direct transcription of a downstream nucleotide sequence. The heterologous nucleotide sequence is assembled in an appropriate frame with the translation, initiation and termination sequences, and if applicable a leader sequence to direct the expression product to the periplasmic space, the extra-cellular medium or cell membrane.

[0060] In a specific embodiment in which the vector is adapted for expressing desired sequences in mammalian host cells, preferred vectors will comprise an origin of replication from the desired host, a suitable promoter and an enhancer, and also any necessary ribosome binding sites, polyadenylation site, transcriptional termination sequences, and optionally 5′-flanking non-transcribed sequences. DNA sequences derived from the SV40 or CMV viral genomes, for example SV40 or CMV origin, early promoters, enhancers, and polyadenylation sites may be used to provide the required non-transcribed genetic elements.

[0061] A recombinant expression vector used in the invention advantageously also comprises an untranscribed polynucleotide region located at the 3′end of the coding sequence (ORF), this 3′-UTR (untranslated region) polynucleotide being useful for stabilizing the corresponding mRNA or for increasing the expression rate of the vector insert if this 3′-UTR harbours regulation signal elements such as enhancer sequences.

[0062] Suitable promoter regions used in the expression vectors are chosen taking into account the host cell in which the nucleic acid sequence is to be expressed. A suitable promoter may be heterologous with respect to the nucleic acid sequence for which it controls the expression, or alternatively can be endogenous to the native polynucleotide containing the coding sequence to be expressed. Additionally, the promoter is generally heterologous with respect to the recombinant vector sequences within which the construct promoter/coding sequence has been inserted. Preferred promoters are the Lacd, LacZ, T3 or T7 bacteriophage RNA polymerase promoters, the lambda PR, PL and Trp promoters (EP-0 036 776), the polyhedrin promoter, or the p10 protein promoter from baculovirus (kit Novagen; Smith et al., (1983); O'Reilly et al. (1992)).

[0063] Preferred selectable marker genes contained in the expression recombinant vectors used in the invention for selection of transformed host cells are preferably dehydrofolate reductase or neomycin resistance for eukaryotic cell culture, TRP1 for S. cerevisiae or tetracycline, rifampicin or ampicillin resistance in E. coli, or Levamsaccharase for Mycobacteria, this latter marker being a negative selection marker.

[0064] Preferred bacterial vectors are listed hereafter as illustrative but not limitative examples: pQE70, pQE60, pQE-9 (Quiagen), pD10, phagescript, psiX174, p.Bluescript SK, pNH8A, pNH16A, pNH18A, pNH46A (Stratagene); pKK223-3, pKK233-3, pDR540, pRIT5 (Pharmacia); pWLNEO, pSV2CAT, pOG44, pXT1, pSG (Stratagene); pSVK3, pBPV, pMSG, pSVL (Pharmacia); pQE-30 (QIA express).

[0065] Preferred bacteriophage recombinant vectors of the invention are P1 bacteriophage vectors such as described by Sternberg N. L. (1992; 1994).

[0066] A suitable vector for the expression of any of the pain associated polypeptides used in the invention or fragments thereof, is a baculovirus vector that can be propagated in insect cells and in insect cell-lines. A specific suitable host vector system is the pVL 1392/1393 baculovirus transfer vector (Pharmingen) that is used to transfect the SF9 cell line (ATCC N^{o}CRL 1711) that is derived from Spodoptera frugiperda.

[0067] The recombinant expression vectors of the invention may also be derived from an adenovirus. Suitable adenoviruses are described by Feldman and Steig (1996) or Ohno et al. (1994). Another preferred recombinant adenovirus is the human adenovirus type two or five (Ad 2 or Ad 5) or an adenovirus of animal origin (Patent Application WO 94/26914)

[0068] Particularly preferred retrovirus for the preparation or construction of retroviral in vitro or in vivo gene delivery vehicles include retroviruses selected from the group consisting of Mink-Cell Focus Inducing Virus, Murine Sarcoma Virus, and Ross Sarcoma Virus. Other preferred retroviral vectors are those described in Roth et al. (1996), in PCT Application WO 93/25234, in PCT Application WO 94/06920, and also in Roux et al. (1989), Julan et al.(l 992) and Nada et al. (1991).

[0069] Yet, another viral vector system that is contemplated consist in the Adeno Associated Viruses (AAV) such as those described by Flotte et al. (1992), Samulski et al. (1989) and McLaughlin et al. (1996).

[0070] Host Cells Expressing Pain Associated Polypeptides

[0071] Host cells that endogenously express pain associated polypeptides or have been transformed or transfected with one of the nucleic acid sequences described herein, or with one of the recombinant vector described above, particularly a recombinant expression vector, can be used in the present invention. Also included are host cells that are transformed (prokaryotic cells) or are transfected (eukaryotic cells) with a recombinant vector such as one of those described above.

[0072] Preferred host cells used as recipients for the expression vectors used in the invention are the following:

[0073] (a) prokaryotic host cells: Escherichia coli, strains. (i.e. DH5-α, strain) Bacillus subtilis, Salmonella typhimurium and strains from species like Pseudomonas, Streptomyces and Staphylococcus for the expression of down regulated nucleic acid sequences modulated by pain, characterized by having at least 80% sequence identity with any of the nucleic acid sequences of Tables I-X. Plasmid propagation in these host cells can provide plasmids for transfecting other cells.

[0074] (b) eukaryotic host cells: HeLa cells (ATCC N^{o}CCL2; N^{o}CCL2.1; N^{o}CCL2.2), Cv 1 cells (ATCC N^{o}CCL70), COS cells (ATCC N^{o}CRL 1650; N^{o}CRL 1651), Sf-9 cells (ATCC N^{o}CRL 1711), C127 cells (ATCC N^{o}CRL-1804), 3T3 cells (ATCC N^{o}CRL-6361), CHO cells (ATCC N^{o}CCL-61), human kidney 293 cells (ATCC N^{o} 45504; N^{o}CRL-1573), BHK (ECACC N^{o}84100 501; N^{o}84111301), PC12 (ATCC N^{o} CRL-1721), NT2, SHSY5Y (ATCC N^{o} CRL-2266), NG108 (ECACC N^{o}88112302) and F11, SK-N-SH (ATCC N^{o} CRL-HTB-11), SK-N-BE(2) (ATCC N^{o} CRL-2271), IMR-32 (ATCC N^{o} CCL-127). A preferred system to which the nucleic acids of the invention can be expressed are neuronal cell lines such as PC12, NT2, SHSY5Y, NG108 and F11, SK-N-SH, SK-N-BE(2), IMR-32 cell lines, COS cells, 3T3 cells, HeLa cells, 292 cells and CHO cells. The above cell lines could be used for the expression of any of the nucleic acid sequences of Tables I-X.

[0075] When a nucleic acid sequence of any of Tables I-X is expressed using a neuronal cell line, the sequence can be expressed under an endogenous promoter or native neuronal promoter, or an exogenous promoter. Suitable exogenous promoters include SV40 and CMV and eukaryotic promoters such as the tetracycline promoter. The preferred promoter when pain associated molecules are endogenously expressed is an endogenous promoter. A preferred promoter in a recombinant cell line is the CMV promoter.

[0076] In a specific embodiment of the host cells described above, these host cells have also been transfected or transformed with a polynucleotide or a recombinant vector for the expression of a natural ligand of any of the nucleic acid sequences of Tables I-X or a modulator of these expression products.

[0077] Proteins, Polypeptides and Fragments

[0078] The expression products of the nucleic acid sequences of Tables I-X or fragment(s) thereof can be prepared using recombinant technology, from cell lines or by chemical synthesis. Recombinant methods, chemical methods or chemical synthetic methods can be used to modify a gene in order to introduce into the gene product, or a fragment of the gene product, features such as recognition tags, cleavage sites or other modifications. For efficient polypeptide production, the endogenous expression system or recombinant expression system should allow the expression products to be expressed in a manner that will allows the production of a functional protein or fragment thereof which can be purified. Preferred cell lines are those that allow high levels of expression of polypeptide or fragments thereof. Such cell lines include cell lines which naturally express any of the nucleic acid sequences of Tables I, II or III or common mammalian cell lines such as CHO cells or COS cells, etc, or more specific neuronal cell lines such as PC12. However, other cell types that are commonly used for recombinant protein production such as insect cells, amphibian cells such as oocytes, yeast and prokaryotic cell lines such as E. coli can also be used.

[0079] The expression products of Tables I-X or fragments thereof can be utilized in screens to identify potential therapeutic ligands, either as a purified protein, as a protein chimera such as those produced by phage display, as a cell membrane (lipid or detergent) preparation, or in intact cells.

[0080] The invention also relates generally to the use of proteins, peptides and peptide fragments for the development of screening technologies for the identification of molecules for the prevention or treatment of pain, and the development of diagnostic tools for the identification and characterization of pain. These peptides include expression products of the nucleic acid sequences of Tables I-X and purified or isolated polypeptides or fragments thereof having at least 90%, preferably 95%, more preferably 98% and most preferably 99% sequence identity with the any of the expression products of nucleic acid sequences of Tables I-X. Expressed peptides and fragments of any of these nucleic acid sequences can be used to develop screening technologies for the identification of novel molecules for the prevention or treatment of pain. These screening technologies could also be used to ascribe new pain therapeutic indications to molecules, which have not previously been ascribed for the prevention or treatment of pain. Furthermore the said expressed peptides and fragments can be used as diagnostic tools and for the development of diagnostic tools.

[0081] Screening Methods

[0082] As discussed above, we have identified nucleic acid sequences whose expression is regulated by pain, particularly chronic pain and more particularly diabetic pain. The expression products of these nucleic acids can be used for screening ligand molecules for their ability to prevent or treat pain, and particularly, but not exclusively, chronic pain. The main types of screens that can be used are described below. The test compound can be a peptide, protein or chemical entity, either alone or in combination(s), or in a mixture with any substance. The test compound may even represent a library of compounds.

[0083] The expression products of any of the nucleic acid sequences of Tables I-X or fragments thereof can be utilized in a ligand binding screen format, a functional screen format or in vivo format. Examples of screening formats are provided.

[0084] A) Ligand Binding Screen

[0085] In ligand binding screening a test compound is contacted with an expression product of one of the sequences of Tables I to X, and the ability of said test compound to interact with said expression product is determined, e.g. the ability of the test compound(s) to bind to the expression product. The expression product can be a part of an intact cell, lipidic preparation or a purified polypeptide(s), optionally attached to a support, such as beads, a column or a plate etc.

[0086] Binding of the test compound is performed in the presence of a ligand to allow an assessment of the binding activity of each test compound. The ligand may be contacted with the expression product either before, simultaneously or after the test compound. The ligand should be detectable and/or quantifiable. To achieve this, the ligand can be labelled in a number of ways, for example with a chromophore, radioactive, fluorescent, phosphorescent, enzymatic or antibody label. Methods of labelling are known to those in the art. If the ligand is not directly detectable it should be amenable to detection and quantification by secondary detection, which may employ the above technologies. Alternatively the expression product or fragment thereof can be detectable or quantifiable using, for example a chromophore, radioactive, fluorescent, phosphorescent, enzymatic or antibody label.

[0087] Binding of the test compound modifies the interaction of the ligand with its binding site and changes the affinity or binding of the ligand for/to its binding site. The difference between the observed amounts of ligand bound relative to the theoretical maximum amount of ligand bound (or to the ligand bound in the absence of a test compound under the same conditions) is a reflection of the binding ability (and optionally the amount and/or affinity) of a test compound to bind the expression product.

[0088] Alternatively, the amount of test compound bound to the expression product can be determined by a combination of chromatography and spectroscopy. This can be achieved with technologies such as Biacore (Amersham Pharmacia). The amount of test compound bound to the expression product can also be determined by direct measurement of the change in mass upon compound or ligand binding to the expression product. Alternatively, the expression product, compound or ligand can be fluorescently labelled and the association of expression product with the test compound can be followed by changes in Fluorescence Energy Transfer (FRET).

[0089] The invention therefore includes a method of screening for pain alleviating compounds, comprising:

[0090] a) contacting a test compound or test compounds in the presence of a ligand with an expression product of any of the nucleic acid sequences of Tables I to X or with cell expressing at least one copy of the expression product or with a lipidic matrix containing at least one copy of the expression product;

[0091] b) determining the binding of the test compound to the expression product, and

[0092] c) selecting test compounds on the basis of their binding abilities.

[0093] In the above method, the ligand may be added prior to, simultaneously with or after contact of the test compound with the expression product. Non limiting examples and methodology can be gained from the teachings of the Molecular Probes handbook and references therein (Molecular Probes, Inc., 4849 Pitchford Ave, Eugene, USA), Methods in neurotransmitter receptor analysis (Yamamura H I., Enna, S J., and Kuhar, M J., Raven Press New York, the Glaxo Pocket Guide to Pharmacology, Dr. Michael Sheehan, Glaxo Group Research Ltd, Ware, Herts SG12 0DP), Bylund D B and Murrin L C (2000, Life Sciences, 67 (24) 2897-911), Owicki J C (2000, J. biomol Screen (5) 297-306), Alberts et al (1994, Molecular Biology of the Cell, 3^{rd} Edn, Garland Publication Inc), Butler J E, (2000 Methods 22(1):4-23, Sanberg S A (2000, Curr Opin Biotechnol 11(1) 47-53), and Christopoulos A (1999, biochem Pharmacol 58(5) 735-48).

[0094] B) Functional Screening

[0095] (a) Kinase Assays

[0096] The expression products of any of the nucleic acid sequences of Tables I to X which encodes a kinase, and in particular the nucleic acid sequences listed in Table I, are amenable to screening using kinase assay technology.

[0097] Kinases have the ability to add phosphate molecules to specific residues in ligands such as binding peptides in the presence of a substrate such as adenosine triphosphate (ATP). Formation of a complex between the kinase, the ligand and substrate results in the transfer of a phosphate group from the substrate to the ligand. Compounds that modulate the activity of the kinase can be determined with a kinase functional screen. Functional screening for modulators of kinase activity therefore involves contacting one or more test compounds with an expression product of one of the nucleic acid sequences of Tables I to X which encodes a kinase, and determining the ability of said test compound to modulate the transfer of a phosphate group from the substrate to the ligand.

[0098] The expression product can be part of an intact cell or of a lipidic preparation or it can be a purified polypeptide(s), optionally attached to a support, for example beads, a column, or a plate. Binding is preferably performed in the presence of ligand and substrate to allow an assessment of the binding activity of each test compound.

[0099] The ligand should contain a specific kinase recognition sequence and it should not be phosphorylated at its phosphoryation site. The ligand and/or substrate may be contacted with the kinase either before, simultaneously or after the test compound. Optionally the substrate may be labelled with a kinase transferable labelled phosphate, the assay being monitored by the phosphorylation state of the substrate and/or the ligand. The ligand should be such that its phosphorylation state can be determined. An alternative method to do this is to label the ligand with a phosphorylation-state-sensitive molecule. To achieve this, the ligand can be labelled in a number of ways, for example with a chromophore, radioactive, fluorescent, phosphorescent, enzymatic or antibody label. If the ligand is not directly detectable it should be amenable to detection and quantification by secondary detection, which may employ the above technologies. Such technologies are known to those in the art.

[0100] Binding of the test compound to the kinase modifies its ability to transfer a phosphate group from the substrate to the ligand. The difference between the observed amounts of phosphate transfer relative to the theoretical maximum amount of phosphate transfer is a reflection of the modulatory effect of the test compound. Alternatively, the degree of phosphate transfer can be determined by a combination of chromatography and spectroscopy. The extent of phosphorylation of the ligand peptide or dephosphorylation of the substrate can also be determined by direct measurement. This can be achieved with technologies such as Biacore (Amersham Pharmacia).

[0101] The invention also provides a method for screening compounds for the ability to relieve pain, which comprises:

[0102] (a) contacting one or more test compounds in the presence of ligand and substrate with an expression product of any of the nucleic acid sequences of Tables I to X which is a kinase or with a cell containing at least 1 copy of the expression product or with a lipidic matrix containing at least 1 copy of an expression product;

[0103] (b) determining the amount of phosphate transfer from the substrate to the ligand; and

[0104] (c) selecting test compounds on the basis of their capacity to modulate phosphate transfer.

[0105] Optionally ligand, substrate and/or other essential molecules may be added prior to contacting the test compound with expression product of step (a) or after step (a). Non limiting examples and methodology can be gained from the teachings of the Molecular Probes handbook and references therein (Molecular Probes, Inc., 4849 Pitchford Ave, Eugene, USA), Methods in Molecular Biology 2000; 99: 191-201, Oncogene 2000 20; 19(49): 5690-701, and FASAB Journal, (10, 6, P55, P1458, 1996, Pocius D Amrein K et al).

[0106] b) Phosphatase Assays

[0107] The expression products of any of the nucleic acid sequences of Tables I to X which encodes a phosphatase, and in particular the nucleic acid sequences listed in Table II, are amenable to screening using phosphatase assay technology.

[0108] Phosphatase enzymes have the ability to remove phosphate molecules from specific residues in ligands such as peptides. This reaction takes place in the presence of a substrate such as Adenosine Diphosphate (ADP). The complexing of the phosphatase polypeptide, ligand and substrate results in the transfer of a phosphate group from the ligand to substrate. Compounds that modulate the activity of the Phosphatase can be determined with a Phosphatase functional screen. This screen detects the reverse of the Kinase functional screen outlined above.

[0109] The invention also provides a method for screening compounds for the ability to relieve pain, which comprises:

[0110] (a) contacting one or more test compounds in the presence of ligand and substrate with an expression product of any of the nucleic acid sequences of Tables I to X which is a phosphatase or with a cell containing at least 1 copy of the expression product or with a lipidic matrix containing at least 1 copy of an expression product;

[0111] (b) determining the amount of phosphate transfer from the ligand to the substrate; and

[0112] (c) selecting test compounds on the basis of their capacity to modulate phosphate transfer.

[0113] Optionally ligand, substrate and/or other essential molecules may be added prior to contacting the test compound with expression product of step (a) or after step (a). Non-limiting examples and methodology can be gained from the teachings of the Molecular Probes handbook and references therein (Molecular Probes, Inc., 4849 Pitchford Ave, Eugene, USA), and FASAB Journal, (10, 6, P55, P1458, 1996, Pocius D Amrein K et al).

[0114] c) Ion Channel Protein Assays

[0115] An expression product of any of the nucleic acid sequences of Tables I to X which encodes an ion channel protein, and in particular the nucleic acid sequence listed in Table III, is amenable to screening using ion channel protein assay technology.

[0116] Ion channels are membrane associated proteins. They are divided into three main groups:

[0117] (1) ligand gated ion channels;

[0118] (2) voltage gated ion channels; and

[0119] (3) mechano gated ion channels.

[0120] Ion channels allow the passage of ions through cellular membranes upon stimulation by ligand, change in membrane potential or physical changes in environment such as temperature and pH. Compounds that modulate the activity of ion channels can be determined with an ion channel functional screen.

[0121] Functional screening for modulators of ion channels involves contacting a test compound with an expression product as aforesaid which is an ion channel protein or a fragment thereof and determining the ability of said test compound to modulate the activity of said expression product or fragment thereof. The expression product can be a part of an intact cell, membrane preparation or lipidic preparation, optionally attached to a support, for example beads, a column, or a plate. The ligand may be contacted with the ion channel peptide before, simultaneously with or after the test compound. Optionally other molecules essential for the function of the ion channel may be present. Ion channel opening is detectable with the addition of Ion channel sensitive dye, such dyes are known to those in the art. Examples are provided in Molecular Probes handbook and references therein (Molecular Probes, Inc., 4849 Pitchford Ave, Eugene, USA) and Glaxo Pocket Guide to Pharmacology (Dr Michael Sheenal Pharmacology Division Staff, Glaxo Group Research Ltd., Ware, Herts SG12 0DP). Binding of the test compound to the ion channel protein modifies its ability to allow ion molecules across a membrane. The difference between the observed amounts of movement of ions across a membrane relative to the theoretical maximum amount of ions that can move across the membrane is a reflection of the modulatory effect of the test compound.

[0122] The invention therefore also relates to a method of screening compounds for their ability to alleviate pain, which method comprises:

[0123] (a) contacting at least one test compound in the presence of voltage potential sensing dye with a cell containing at least 1 copy of an expression product as aforesaid which is an ion channel protein or with a lipidic matrix containing at least one copy of the expression product;

[0124] a) applying a ligand or stimulus;

[0125] b) determining the opening of the ion channel, and

[0126] c) selecting a test compound on the basis of its ability to modulate movement of ions across the membrane.

[0127] d) Receptor Assays

[0128] An expression product of any of the nucleic acid sequences of Tables I to X which encodes a receptor, and in particular any of the nucleic acid sequences listed in Table IV, is amenable to screening using receptor assay technology.

[0129] Receptors are membrane associated proteins that initiate intracellular signalling upon ligand binding. Therefore, the identification of molecules for the prevention and treatment of pain can be achieved with the use of a ligand-binding assay, as outlined above. Such an assay would utilize an endogenous or non-endogenous ligand as a component of the ligand-binding assay. The binding of this ligand to the receptor in the presence of one or more test compounds would be measures as described above. Such is the nature of receptors that the assay is usually, but not exclusively performed with a receptor as an intact cell or membranous preparation.

[0130] The invention therefore includes a method of screening for pain alleviating compounds, comprising:

[0131] a) contacting a test compound or test compounds in the presence of a ligand with cells expressing at least one copy of the expression product of any of the nucleic acid sequences of Tables I to X which is a receptor or with a lipidic matrix containing at least one copy of the expression product;

[0132] b) determining the binding of the test compound to the expression product, and

[0133] c) selecting test compounds on the basis of their binding abilities.

[0134] e) Transporter Protein Assays

[0135] An expression product of any of the nucleic acid sequences of Tables I to X which encodes a transporter protein, and in particular any of the nucleic acid sequences listed in Table V, is amenable to screening using transporter protein assay technology. Non limiting examples of technologies and methodologies are given by Carroll F I, et al (1995, Medical Research Review, September 15 (5) p419-444), Veldhuis J D and Johnson M l (1994, Neurosci. Biobehav Rep., winter 18(4) 605-12), Hediger M A and Nussberger S (1995, Expt Nephrol, July-August 3(4) p211-218, Endou H and Kanai Y, (1999, Nippon Yakurigaku Zasshi, Oct. 114 Suppl 1:1 p-16 p), Olivier B et al (2000, Prog. Drug Res., 54, 59-119), Braun A et al (2000, Eur J Pharm Sci, October 11, Suppl 2 S51-60) and Molecular Probes handbook and references therein (Molecular Probes, Inc., 4849 Pitchford Ave, Eugene, USA).

[0136] The main function of transporter proteins is to facilitate the movement of molecules across a cellular membrane. Compounds that modulate the activity of transporter proteins can be determined with a transporter protein functional screen. Functional screening for modulators of transporter proteins comprises contacting at least one test compound with an expression product as aforesaid which is a transporter protein and determining the ability of said test compound to modulate the activity of said transporter protein. The expression product can be part of an intact cell, or lipidic preparation, optionally attached to a support, for example beads, a column or a plate. Binding is preferably performed in the presence of the molecule to be transported, which should only able to pass through a cell membrane or lipidic matrix with the aid of the transporter protein. The molecule to be transported should be able to be followed when it moves into a cell or through a lipidic matrix. Preferably the molecule to be transported is labelled to aid in characterization, e.g. with a chromophore, radioactive, fluorescent, phosphorescent, enzymatic or antibody label. If the molecule to be transported is not directly detectable it should be amenable to detection and quantification by secondary detection, which may employ the above technologies. The molecule to be transported may be contacted with the transporter protein before, simultaneously with or after the test compound. If binding of the test compound to the transporter protein modifies its ability to transport molecules through a membranous or lipidic matrix then the difference between the observed amount of transported molecule in a cell/or through a lipidic matrix relative to the theoretical maximum amount is a reflection of the modulatory effect of the test compound.

[0137] The invention further provides a method for screening compounds for their ability to relieve pain, comprising

[0138] a) contacting at least one test compound in the presence of transported molecules with a cell containing at least one copy of an expression product of any of the nucleic acid sequences of Tables I to X which is a transporter protein or with a lipidic matrix containing at least one copy of the expression product;

[0139] b) measuring the movement of transported molecules into or from the cell, or across the lipidic matrix; and

[0140] c) selecting test compounds on the basis of their ability to modulate the movement of transported molecules.

[0141] f) G-protein Coupled Receptor Protein Assays

[0142] An expression product of any of the nucleic acid sequences of Tables I to X that encodes a G-protein coupled receptor protein, and in particular the nucleic acid sequences listed in Table VI, is amenable to screening using G-protein coupled receptor protein assay technology.

[0143] G-protein coupled receptor proteins (GPCRs) are membranous proteins whose main function is to transduce a signal through a cellular membrane. Upon ligand binding, GPCRs undergo a conformational change that allows complexing of the GPCRs with a G-protein. G-proteins possess a GTP/GDP binding site. The formation of the G-protein/ligand complex allows exchange of GTP for GDP, resulting in a conformational change of the G-protein. This conformational change initiates signal transduction.

[0144] Functional screening for modulators of GPCRs comprises contacting at least one test compound with an expression product as aforesaid which is a G-protein coupled receptor protein, and assessing the ability of the test compound(s) to modulate the exchange of GTP for GDP or the modulation of the GPCR signal transduction pathway. The expression product can be part of an intact cell or lipidic preparation, optionally attached to a support, for example beads, a column or a plate. Binding is preferably performed in the presence of a ligand, G-protein and GTP/GDP to allow an assessment of the binding activity of each test compound. Alternatively components of the signalling pathway are also included. In particular, in a preferred embodiment, a labelled GTP is used and the ability of the test compound(s) to modulate the exchange of GTP to GDP is determined. A further optional characteristic of the assay can be the inclusion of a reporter molecule that enables monitoring the regulation of the signalling pathway. The ligand may be contacted with the GPCR before, simultaneously with or after the test compound. Binding of the test compound to the GPCR modifies its ability to modulate the exchange of GTP for GDP and hence the modulation of signal transduction. The difference between the observed amount of GTP exchanged for GDP relative to the theoretical maximum amount of GTP is a reflection of the modulatory effect of the test compound. Likewise the relative activities of signal transduction reporter molecules are also a reflection of the modulatory effect of the test compound. Non limiting examples of technologies and methodologies can be found in Molecular Probes handbook and references therein (Molecular Probes, Inc., 4849 Pitchford Ave, Eugene, USA), Glaxo Pocket Guide to Pharmacology, (Michael Sheehan, Pharmacology Division staff, Glaxo Group Research Ltd., Ware, Herts SC12 0DP) and Xing et al (2000, J. Recept. Signal. Transduct. Res. 20(40 189-210).

[0145] The invention provides a method of screening compounds for their ability to relieve pain, comprising:

[0146] a) contacting at least one test compound in the presence of a ligand, GTP/GDP, G-protein with a cell containing at least one copy of an expression product of any of the nucleic acid sequences of Tables I to X which is a G-protein coupled receptor protein or with a lipidic matrix containing at least one copy of the expression product;

[0147] b) measuring the exchange of GTP for GDP, and

[0148] c) selecting test compounds on the basis of their ability to modulate said exchange.

[0149] In the above method, the ligand, GTP/GDP, G-protein and other essential molecules can be added before, simultaneously with or after the contacting of the test compound(s) with the cell line or lipidic matrix in step a).

[0150] g) DNA-binding Protein Assays

[0151] An expression product of any of the nucleic acid sequences of Tables I to X that encodes a DNA-binding protein, and in particular any of the nucleic acid sequences listed in Table VII, is amenable to screening using DNA-binding protein assay technology.

[0152] DNA binding proteins are proteins that are able to complex with DNA. The complexing of the DNA binding protein with the DNA in some instances requires a specific nucleic acid sequence. Screens can be developed in a similar manner to ligand binding screens as previously indicated and will utilise DNA as the ligand. DNA-binding protein assays can be carried using similar principles described in ligand binding assays as described above. Non limiting examples of methodology and technology can be found in the teachings of Haukanes B I and Kvam C (Biotechnology, 1993 January 11 60-63), Alberts B et al (Molecular Biology of the Cell, 1994, 3^{rd} Edn., Garland Publications Inc, Kirigiti P and Machida C A (2000 Methods Mol Biol, 126, 431-51) and Molecular Probes handbook and references therein (Molecular Probes, Inc., 4849 Pitchford Ave., Eugene, USA).

[0153] The invention therefore includes a method of screening for pain alleviating compounds, comprising:

[0154] a) Contacting a test compound or test compounds in the presence of a plurality of nucleic acid sequences with an expression product of any of the nucleic acid sequences of Tables I to X which is a DNA binding protein or with cell expressing at least one copy of the expression product or with a lipidic matrix containing at least one copy of the expression product;

[0155] b) Determining the binding of the test compound to the expression product, and

[0156] c) Selecting test compounds on the basis of their binding abilities.

[0157] In the above method, the plurality of nucleic acid sequence may be added prior to, simultaneously with or after contact of the test compound with the expression product.

[0158] h) Protease Assays

[0159] An expression product of any of the above nucleic acid sequences that encodes a protease protein, and in particular any of the nucleic acid sequences listed in Table VIII, is amenable to screening using protease protein assay technology. Non-limiting examples of such technologies are illustrated in Molecular Probes handbook and references therein (Molecular Probes, Inc., 4849 Pitchford Ave, Eugene, USA), Cook et al (1992, Structure and function of the aspartic proteinases, Ed. Dunn B M, Plenum Press, New York, 525-528) and Peranteau A G et al (1995, Anal Biochem, 1, 227(1) 242-5).

[0160] Protease proteins have the property of being able to cleave peptide sequences. In brief, one characteristic of the protease-screening assay is the peptide ligand, which may contains at least one copy of a protease protein recognition sequence. The cleavage of this polypeptide by the protease results in the fragmentation of the peptide ligand. The propensity of the protease to fragment the peptide ligand in the presence of a candidate compound(s) is a measure of the inhibitory qualities of the candidate compound(s).

[0161] The protease-screening assay may be performed in the presence of at least a ligand binding peptide and a protease. These screening assays can be performed in the presence of isolated expression product, expression product in cells or expression product in a lipidic matrix. The invention therefore includes a method of screening for pain alleviating compounds, comprising:

[0162] (a) contacting one or more test compounds in the presence of peptide ligand with an expression product of any of the nucleic acid sequences of Tables I to X which is a protease or with a lipidic matrix containing at least one copy of the expression product;

[0163] (b) determining the amount of cleavage of peptide ligand; and

[0164] (c) selecting test compounds on the basis of their ability to modulate the amount of ligand cleavage.

[0165] i) Assays Using Other Enzymes

[0166] Expression products of any of the nucleic acid sequences of Tables I to X that encode other enzymes, e.g. ligases, lyases, oxidoreductases, transferases and hydrolases, and in particular any of the nucleic acid sequences listed in Table IX, is amenable to screening using appropriate assay technology. Each class of enzyme has a defined function.

[0167] Ligases have the property of being able to splice molecules together. This is achieved with the conversion of ATP substrate to AMP. Therefore, the activity of a ligase can be followed by monitoring the conversion of ATP to AMP. Such technologies are known to those in the art. Non-limiting examples and methodologies can are illustrated by Ghee. T Tan et al (1996, Biochem J. 314, 993-1000, Yang S W et al (1992, 15: 89(6) 2227-31 and references therein, and in Molecular Probes handbook and references therein (Molecular Probes, Inc., 4849 Pitchford Ave, Eugene, USA).

[0168] The invention also provides methods of screening for pain alleviating compounds, comprising;

[0169] a) contacting one or more test compounds in the presence of ATP with an expression product of any of the nucleic acid sequences of Tables I to X which is a ligase or with a cell expressing at least 1 copy of a expression product or with a lipidic matrix containing at least 1 copy of an expression product;

[0170] b) determining the amount of ATP converted to AMP, and

[0171] c) selecting test compounds on the basis of their ability to modulate said conversion.

[0172] Lyases are enzymes which catalyse the cleavage of by reactions other than hydrolysis. These enzymes can be grouped into seven groups according to type of bond cleaved. These groups are:

[0173] carbon-carbon lyases (E.C. No 4.1);

[0174] carbon-oxygen lyases (E.C. No 4.2);

[0175] carbon-nitrogen lyases (E.C. No 4.3);

[0176] carbon-sulphur lyase (E.C. No 4.4);

[0177] carbon-halide lyases (E.C. No 4.5);

[0178] phosphorous-oxygen lyases (E.C. No 4.6); and

[0179] other lyases (E.C. No 4.99) (Analytical Biochemistry 3^{rd} Edn, David J. Holme and Hazel Peck, Longman press).

[0180] The enzyme commission number (E.C.) of the International Union of Biochemistry relates to the type of reaction catalysed by the enzyme. Further teachings on how to develop assays and screens for lyases can be obtained from Methods in Enzymology (Academic Press).

[0181] Oxidoreductases are enzymes that catalyse the transfer of hydrogen or oxygen atoms or electrons. These enzymes can by sub-grouped into twenty categories according to their specific mode of action. These groups are oxidoreductases acting on:

[0182] the CH—OH group of donors (E.C. No 1.1);

[0183] the aldehyde or oxo group of donors (E.C. No 1.2);

[0184] the CH—CH group of the donor (E.C. No 1.3);

[0185] the CH—NH2 group of donors (E.C. 1.4);

[0186] CH—NH group of donors (E.C. 1.5);

[0187] NADH or NADPH (E.C. No 1.6);

[0188] other nitrogen compounds as donors (E.C. No 1.7);

[0189] a sulphur group of donors (E.C. No 1.8);

[0190] a haem group of donors (E.C. No 1.9);

[0191] diphenols and related substances as donors (E.C. 1.10);

[0192] hydrogen peroxide as acceptor (E.C. No 1.11);

[0193] hydrogen as donor (E.C. No 1.12);

[0194] single donors with incorporation of molecular oxygen (E.C. No 1.13);

[0195] oxidoreductases acting on paired donors with incorporation of molecular oxygen (E.C. No 1.14);

[0196] superoxide radicals as acceptors (E.C. 1.15);

[0197] oxidizing metal ions (E.C. No 1.16);

[0198] oxidoreductases acting on —CH2 groups (E.C. No 1.17);

[0199] reduced ferredoxin as donor (E.C. No 1.18);

[0200] reduced flavodoxin as donor (E.C. No 1.19); and

[0201] other oxidoreductases (E.C. No 1.97) (Analytical Biochemistry 3^{rd} Edn, David J. Holme and Hazel Peck, Longman Press).

[0202] The enzyme commission number (E.C.) of the International Union of Biochemistry relates to the type of reaction catalysed by the enzyme. Further teachings on how to develop assays and screens for oxidoreductases can be obtained from Methods in Enzymology (Academic Press) with special reference to volume 249.

[0203] Transferases are enzymes that catalyse the transfer of specific groups. They are classified into eight sub groups according to function, transferring one-carbon group (E.C. No 2.1), Transferring aldehyde or ketonic residues (E.C. No 2.2), Acetyltransferases (E.C. 2.3), glycosyltransferases (E.C. No 2.4), transferring alkyl or aryl groups other than methyl groups (E.C. No 2.5), transferring nitrogenous groups (E.C. No 2.6), transferring phosphorous-containing groups (E.C. No 2.7) and transferring sulphur-containing groups (E.C. No 2.8) (Analytical Biochemistry 3^{rd} Edn, David J. Holme and Hazel Peck, Longman Press). The enzyme commission number (E.C.) of the International Union of Biochemistry relates to the type of reaction catalysed by the enzyme. Further teachings on how to develop assays and screens for transferases can be obtained from Methods in Enzymology (Academic Press).

[0204] Hydrolases are enzymes that catalyse hydrolytic reactions and are sub-grouped into eleven classes according to the type of reaction they carry out, viz:

[0205] ester bonds (E.C. No 3.1);

[0206] glycosyl compounds (E.C. No 3.2);

[0207] ether bonds (E.C. No 3.3);

[0208] peptide bonds (E.C. No 3.4);

[0209] hydrolases acting on carbon-nitrogen bonds, other than peptide bonds (E.C. No 3.5);

[0210] acid anhydrides (E.C. No 3.6);

[0211] carbon-carbon bonds (E.C. No 3.7);

[0212] halide bonds (E.C. No 3.8);

[0213] phosphorous-nitrogen bonds (E.C. No 3.9);

[0214] sulphur-nitrogen bonds (E.C. No 3.10); and

[0215] hydrolases acting on carbon-phosphorous bonds. (See Analytical Biochemistry 3^{rd} End, David J. Holmes and Hazel Peck, Longman Press).

[0216] The enzyme commission number (E.C.) of the International Union of Biochemistry relates to the type of reaction catalyzed by the enzyme. Further teachings on how to develop assays and screens for hydrolases can be obtained from Methods in Enzymology (Academic Press) with special reference to volume 249.

[0217] C) In Vivo Functional Screen

[0218] Any of the nucleic acid sequences described in Tables I to X or homologues thereof may be inserted by means of an appropriate vector into the genome of a lower vertebrate or of an invertebrate animal or may be inactivated or down regulated in the genome of said animal. The resulting genetically modified animal may be used for screening compounds for effectiveness in the regulation of pain. The invertebrate may, for example, be a nematode e.g. Caenorhabditis elegans, which is a favourable organism for the study of response to noxious stimuli. Its genome sequence has been determined, see Science, 282, 2012 (1998), it can be bred and handled with the speed of a micro-organism (it is a self-fertilizing hermaphrodite) and can therefore be used in a high throughput screening format (WO 00/63424, WO 00/63425, WO 00/63426 and WO 00/63427), and it offers a full set of organ systems, including a simple nervous system and contains many similarly functioning genes and signaling pathways to mammals. A thermal avoidance model based on a reflexive withdrawal reaction to an acute heat stimulus has been described by Wittenburg et al, Proc. Natl. Acad. Sci. USA, 96, 10477-10482 (1999), and allows the screening of compounds for the treatment of pain with the modulation of pain sensation as an endpoint.

[0219] The genome of C. elegans can be manipulated using homologous recombination technology which allows direct replacement of nucleic acids encoding C. elegans with their identified mammalian counterpart. Replacement of these nucleic acids with those nucleic acids outlined above would allow for the direct screening of test compound(s) with their expression products. Any of the pain-related genes described above may be ligated into a plasmid and introduced into oocytes of the worm by microinjection to produce germline transformants. Successful plasmid injection into C. elegans and expression of inserted sequences has been reported by Devgen B. V., Ghent, Belgium. It is also possible to produce by routine methods worms in which the target sequences are down-regulated or not expressed (knock-out worms). Further non limiting examples of methodology and technology can be found in the teachings of Hazendonk et al (1997, Nat genet. 17(1) 119-21), Alberts et al, (1994, Molecular Biology of the Cell 3^{rd} Ed. Garland Publishing Inc, Caenorhabditis elegans is anatomically and genetically simple), Broverman Set al, (1993, PNAS USA 15; 90(10) 4359-63) and Mello et al (1991, 10(12) 3959-70).

[0220] A further method for screening compounds for ability to modify response to pain, e.g. relieve pain, comprises:

[0221] (a) contacting one or more test compounds with at least one C elegans containing at least one copy of a sequence as set out above;

[0222] (b) subjecting the C. elegans to a nociceptive stimulus;

[0223] (c) observing the response of the C. elegans to said stimulus; and

[0224] d) selecting test compounds on the basis of their ability to modify the response of C. elegans to said stimulus.

[0225] Diagnostic Tools and Kits

[0226] Affinity Peptides, Ligands and Substrates

[0227] Pain associated polypeptides and fragments thereof can be detected at the tissue and cellular levels with the use of affinity peptides, ligands and substrates, which will enable a skilled person to define more precisely a patient's ailment and help in the prescription of a medicament. Such affinity peptides are characterized in that firstly they are able to bind specifically to a pain associated polypeptide, and secondly that they are capable of being detected. Such peptides can take the form of a peptide or polypeptide for example an antibody domain or fragment, or a peptide/polypeptide ligand or substrate, or a polypeptide complex such as an antibody.

[0228] The preparation of such peptides and polypeptides are known to those in the art. Antibodies, these may be polyclonal or monoclonal, and include antibodies derived from immunized animals or from hybridomas, or derivatives thereof such as humanized antibodies, Fab or F(ab′)2 antibody fragments or any other antibody fragment retaining the antigen binding specificity.

[0229] Antibodies directed against pain-associated gene product molecules may be produced according to conventional techniques, including the immunization of a suitable mammal with the peptides or polypeptides or fragment thereof. Polyclonal antibodies can be obtained directly from the serum of immunized animals. Monoclonal antibodies are usually produced from hybridomas, resulting from a fusion between splenocytes of immunized animals and an immortalized cell line (such as a myeloma). Fragments of said antibodies can be produced by protease cleavage, according to known techniques. Single chain antibodies can be prepared according to the techniques described in U.S. Pat. No. 4,946,778. Detection of these affinity peptides could be achieved by labelling. Technologies that allow detection of peptides, such as enzymatic labelling, fluorescence labelling or radiolabelling are well known to those in the art. Optionally these affinity peptides, ligands and substrates could themselves be detected with the use of a molecule that has specific affinity to the peptides, ligands and substrates and is itself labelled.

[0230] The invention further provides a kit, which comprises;

[0231] (a) affinity peptide and/or ligand and/or substrate for an expression product of a gene sequence that is down-regulated in the spinal cord of a mammal in response to streptozocin-induced diabetes; and

[0232] (b) a defined quantity of an expression product of a gene sequence that is down-regulated in the spinal cord of a mammal both in response to streptozocin-induced diabetes, for simultaneous, separate or sequential use in detecting and/or quantifying an expression product of a gene sequence that is down-regulated in the spinal cord of a mammal in response to streptozocin-induced diabetes

[0233] Complimentary Nucleic Acids

[0234] Pain associated nucleic acid sequences can be characterized at the tissue and cellular levels with the use of complimentary nucleic acid sequences. Detection of the level of expression of pain associated nucleic acid sequences can help in the prognosis of a pain condition and the prescription of a medicament. These complimentary nucleic acid sequences are characterized in that they can hybridize to a pain associated nucleic acid sequence and their presence can be detected through various techniques. Such techniques are known to those in the art and may include detection by polymerase chain reaction or detection by labelling of complimentary nucleic acid sequences by enzymatic labelling, affinity labelling fluorescent labelling or radio-labelling. Complimentary strand nucleic acids of this invention are 10 to 50 bases long, more preferably 15 to 50 bases long and most preferably 15 to 30 bases long, and hybridize to the coding sequence of the nucleic acid.

[0235] A further aspect of this invention is a kit that comprises:

[0236] (a) nucleic acid sequences capable of hybridization to a nucleic acid sequence that is down-regulated in the spinal cord of a mammal in response streptozocin-induced diabetes and

[0237] (b) a defined quantity of one or more nucleic acid sequences capable of hybridization to a nucleic acid sequence that is down-regulated in the spinal cord of a mammal in response to streptozocin-induced diabetes, for simultaneous, separate or sequential use in detecting and/or quantifying a gene sequence that is down-regulated in the spinal cord of a mammal in response to streptozocin-induced diabetes.

[0238] Identification and Validation

[0239] Subtractive hybridization enables the identification of nucleic acid sequences whose expression profiles are modified by a stimulus. Upon stimulation of a system (in the case of this invention a nociceptive stimulus on an animal model) all observed changes in the level of nucleic acid sequence expression are due to the reaction of the system to the stimulus. Characterization of these changes in expression by way of identification of nucleic acid sequence and level of expression is both identification and validation.

[0240] The inventors have developed a four step process which allows for the simultaneous identification and validation of nucleic acid sequences whose expression are regulated by a pain stimulus, preferably a chronic pain stimulus, and more preferably a diabetic pain stimulus. This process comprises the following steps:

[0241] (a) induction of a nociceptive stimulus in test animals;

[0242] (b) extraction of nucleic acid sequences from specific neuronal tissue of test and control animals;

[0243] (c) selective amplification of differentially expressed nucleic acid sequences; and

[0244] (d) identification and characterization of differentially expressed gene products that are modulated by a nociceptive stimulus.

[0245] The above process is described in more detail below.

[0246] (a) Induction of Nociceptive Stimulus

[0247] The effect of the selected nociceptive stimulus on the test animal needs to be confirmable. The test subjects are therefore a species that has a “developed” nervous system, preferably similar to that of humans, most preferably rats or mice. Advantageously, the nociceptive stimulus is analogous to known pain paradigms in humans. One such paradigm of pain is the pain associated with diabetes, which can be induced in rodents with the use of streptozotocin (STZ).

[0248] Streptozotocin (STZ) induces hyperglycemia and Type 1 diabetes mellitus in rats. In particular, STZ contains a glucose analogue that allows it to be taken up by the glucose transporter 2 present on the surface of pancreatic β cells, the site of insulin synthesis. Once inside the cell, STZ causes a reduction in the level of nicotinamide adenine dinucleotide (NAD⁺). The decrease in NAD⁺levels eventually leads to necrosis of the pancreatic β cell, causing a reduction in insulin levels and then diabetes, leading to neuropathy (diabetic) and neuropathic pain (R. B. Weiss, Cancer Treat. Rep., 66, 427-438 1982, Guy et al, Diabetologica, 28, 131-137 1985; Ziegler et al, Pain, 34, 1-10 1988; Archeret al, J. Neurol. Neurosurg. Psychiatry, 46, 491-499 1983). The diabetic rat model has been shown to be a reliable model of hyperalgesia. We have used an STZ-induced diabetic rat model to create a state of hyperlagesia that can be compared with control animals (Courteix et al, Pain, 53, 81-88 1993).

[0249] (b) Extraction of Nucleic Acids from Neuronal Tissue of Test and Control Animals

[0250] The inventors have determined that RNA extraction of whole spinal cord nervous tissue provides a way of identifying nucleic acid sequences whose expression is modulated by streptozotocin induced pain. Test (subjected to the nociceptive stimulus) and control animals were sacrificed, and the tissue to be studied e.g. neural tissue separated. Techniques for so doing vary widely from animal to animal and will be familiar to skilled persons.

[0251] A cDNA library can be prepared from total RNA extracted from neural tissue of the test and control animals. Where possible, however, it is preferred to isolate the mRNA from the total RNA of the test and control animals, by affinity chromatography on oligo (dT)-cellulose, and then reverse transcribe the mRNA from the test and control animals to give test and control cDNA. Converting mRNA from the test and control animals to corresponding cDNA may be carried out by any suitable reverse transcription method, e.g. a method as described by Gubler & Hoffman, Gene, 25, 263-269 (1983). If desired a proprietary kit may be used e.g. the CapFinder PCR cDNA Library Construction Kit (Life Technologies) which is based on long-distance PCR and permits the construction of cDNA libraries from nanograms of total RNA.

[0252] (c) Selective Amplification of Differentially Expressed Nucleic Acids

[0253] The reverse transcribed cDNA of the test and control animals is subjected to subtractive hybridisation and amplification so that differentially expressed sequences become selectively amplified and commonly expressed sequences become suppressed, so as to over-produce DNA associated with said nociceptic stimulus. A wide range of subtractive hybridisation methods can be used, but the preferred method is so-called suppression subtractive hybridisation, see U.S. Pat. No. 5,565,340 and Diatchenko et al, Proc. Nat. Acad. Sci. USA, 93, 6025-6030 (1996), the disclosures of which are herein incorporated by reference. Kits for carrying out this method are available from CLONTECH Laboratories, Inc.

[0254] (d) Cloning and Sequencing the Differentially Expressed cDNA

[0255] The differentially expressed cDNA is ligated into a cloning vector, after which cells of E. coli are transformed with the vector and cultured. Positive clones are selected and burst to release plasmids containing the cDNA insert. The plasmids are primed using forward and reverse primers to either side of the cloning site and the cDNA insert is sequenced. Vector and adaptor sequences are then removed from the output data from the sequencer, leaving only the nucleotide sequence of the differentially expressed gene. The sequence is then checked against data held in a database for homology to known genes, expressed sequence tags (ESTs) and proteins.

[0256] (e) Validation of the Above Method

[0257] The importance of the sequences that we have identified in pain is confirmed by the fact that genes that represent nucleic acid sequences which have previously been implicated in pain, including Calmodulin (PRCM1, Genebank X13933), Enkephalin (Genebank Y07503) and Neurotensin receptor type 2 (Genebank X97121) have also been identified using this method.

[0258] The inventors have identified nucleic acid sequences of the MAP kinase pathway, a previously non pain-associated biological pathway. The inventors have subsequently shown that intra-spinal injection of a MEK inhibitor (MEK is part of the MAP kinase pathway) produces a powerful inhibition of pain (U.S. patent application Ser. No. 60/144292). Subsequently, it has been shown that the MAP kinase is also implicated in acute inflammatory pain (Woolf et al, Nature Neuroscience 1999).

[0259] The invention will now be further described in the following Example.

### EXAMPLE

[0260] Induction of Diabetes

[0261] Diabetes was induced in adult (150-200 g) male Sprague-Dawley rats (n=6) as described by Courteix et al (supra). Animals were injected intraperitoneally with streptozotocin (STZ)(50 mg/kg) dissolved in distilled water. Control or sham animals (age-matched animals, n=6) were injected with distilled water only.

[0262] Nociceptive Testing

[0263] Static allodynia (a form of hyperlagesia) was measured using a method described by Chaplan let al, “Quantitative assessment of tactile allodinya in the rat paw”, J. Neurosci. Methods, 53, 55-63 (1994). A series of von Frey filaments of different buckling weight (i.e. the load required for the filament to bend) were applied to the plantar surface of the right hand paw. The starting filament had a buckling weight of 20 g. Lifting of the paw was taken to be a positive result, in which case a filament with the next lowest buckling weight was used for the next measurement. The test was continued until a filament was found for which there was an absence of response for longer than 5 seconds whereas a re-test with the next heaviest filament gave a positive response. Animals were considered hyperalgesic if their thresholds were found to be <4 g of those of comparable untreated rats, see Calcutt & Chaplan, “Spinal pharmacology of tactile allodynia in diabetic rats”, British J. Pharmacol, 122, 1478-1482 (1997).

[0264] Tissue Extraction

[0265] STZ-treated and control animals were anaesthetized with 4% halothane and perfused with ice-cold 0.9% saline containing 1% citric acid (pH adjusted to 7.4 with NaOH). The animals were decapitated and the lumbar spinal cord exposed. A 2-centimetre length of spinal cord ending at L6 (lumbar-6 forward) was removed from the spinal column. Attached dorsal root ganglia and contaminating spinal connective tissues were removed. The spinal cord tissue was snap frozen in dry ice and isopentane.

[0266] Total RNA Extraction

[0267] Total RNA was extracted from the above pooled male rat tissues using the TRIZOL Reagent Kit (Life Technologies). Briefly, tissue samples were homogenised fully using a Polytron homogenizer in 1 ml of TRIZOL reagent per 50-100 mg of tissue. Homogenized samples were then incubated at room temperature for 5 minutes and phase separated using 0.2 ml chloroform per 1 ml TRIZOL reagent followed by centrifugation at 3,000 g. The aqueous phase was transferred to a fresh tube and the RNA precipitated with an equal volume of isopropyl alcohol and followed by centrifugation at 10,000 g. The RNA pellet was washed in 75% ethanol and re-centrifuged. The pellet was then air dried and re-suspended in water.

[0268] mRNA Extraction

[0269] In contrast to ribosomal RNA and transfer RNA, the vast majority of mRNAs of mammalian cells carry tracts of poly(A⁺) at their 3′ termini. mRNAs can therefore be separated from the bulk of cellular RNA by affinity chromatography on oligo (dT)-cellulose. mRNA was extracted from Total RNA using the MESSAGEMAKER Kit (Life Technologies) in which mRNA (previously heated to 65° C. in order to disrupt secondary structures and so expose the poly (A⁺) tails) was bound to oligo(dT) cellulose under high salt concentrations (0.5M NaCl) in a filter syringe. Unbound RNA was then washed away and the poly(A⁺) mRNA eluted in distilled water. A tenth of the volume of 7.5 M Ammonium Acetate, 50 μg of glycogen/ml mRNA sample and 2 volumes of absolute alcohol were then added to the samples which are then placed at −20° C. overnight. Following precipitation, the mRNA was spun down at 12,000 g for 30 minutes at 4° C. RNAase free water was used to re-suspend the pellets, which were then and stored at −80° C.

[0270] PCR Select

[0271] The technique used was based on that of the CLONTECH PCR Select Subtraction Kit. The following protocol was performed using STZ-treated lumbar spinal cord Poly A⁺RNA as the ‘Tester’ and Sham lumbar spinal cord poly A⁺RNA as the ‘Driver’ (Forward Subtraction). A second subtraction experiment using the Sham lumbar spinal cord mRNA as the ‘Tester’ and STZ treated lumbar spinal cord mRNA as the ‘Driver’ (Reverse Subtraction) was performed in parallel using the same reagents and protocol. As a control for both experiments, the subtraction was also carried out using human skeletal muscle mRNA that had been provided by the kit manufacturer.

[0272] First-Strand cDNA Synthesis

[0273] 2 μg of PolyA⁺RNA and 1 μl of cDNA synthesis primer (10 □M) were combined in a 0.5 ml Eppendorf tube and sterile H₂O was added where necessary to achieve a final volume of 5 μl. The contents were mixed gently and incubated in a thermal cycler at 70° C. for 2 min. The tubes were then cooled on ice for two minutes, after which 2 μl of 5× First-strand buffer, 1 μl of dNTP mix (10 mM each), sterile H₂O and 1 μl of AMV reverse transcriptase (20 units/μl) was also added. The tubes were then placed at 42° C. for 1.5 hr in an air incubator. First-strand cDNA synthesis was terminated by placing the tubes on ice. (the human skeletal muscle cDNA produced by this step was used as the ‘control driver’ in later steps).

[0274] Second-Strand cDNA Synthesis

[0275] 48.4 μl of Sterile H₂O, 16.0 μl of 5× Second-strand buffer, 1.6 μl of dNTP mix (10 mM) and 4.0 μl of 20× Second-strand enzyme cocktail were added to each of the first-strand synthesis reaction tubes. The contents were then mixed and incubated at 16° C. in a thermal cycler for 2 hr. 6 units (2 μl) of T4 DNA polymerase was then introduced and the tubes were incubated for a further 30 min at 16° C. In order to terminate second-strand synthesis, 4 μl of 20× EDTA/glycogen mix was added. A phenol:chloroform extraction was then carried out using the following protocol:—

[0276] 100 μl of phenol:chloroform:isoamyl alcohol (25:24:1) was added to the tubes which were then vortexed thoroughly and centrifuged at 14,000 rpm for 10 min at room temperature. The top aqueous layer was removed and placed in a fresh tube. 100 μl of chloroform:isoamyl alcohol (24:1) was then added to the aqueous layer and the tubes were again vortexed and centrifuged at 14,000 rpm for 10 min. 40 μl of 4 M NH₄OAc and 300 μl of 95% ethanol were then added and the tubes centrifuged at 14,000 rpm for 20 min. The supernatant was removed carefully, then 500 μl of 80% ethanol was added to the pellet. The tubes were centrifuged at 14,000 rpm for 10 min and the supernatant was removed so that the pellet could be air-dried. The precipitate was then dissolved in 50 μl of H₂O. 6 μl was transferred to a fresh microcentrifuge tube. The remainder of the sample was stored at −20° C. until needed.

[0277] Rsa I Digestion

[0278] All products of the above procedures were subjected to a restriction digest, using the restriction endonuclease Rsa 1, in order to generate ds cDNA fragments that are short and thus are optimal for subtraction hybridisation due to the standard kinetics of the hybridisation. Also, as Rsa I makes a double stranded cut in the middle of a recognition sequence, ‘blunt ends’ of a known nucleotide sequence are produced allowing ligation of adaptors onto these ends in a later step. The following reagents were added to the 6 μl product of the second hybridisation (see above): 43.5 μl of ds cDNA, 5.0 μl 10× Rsa I restriction buffer and 1.5 μl of Rsa I (10 units/μl). The reaction mixture was incubated at 37° C. for 1.5 hr. 2.5 μl of 20× EDTA/glycogen mix was used to terminate the reaction. A phenol:chloroform extraction was then performed as above (second-strand cDNA synthesis section). The pellet produced was then dissolved in 5.5 μl of H₂O and stored at −20° C. until needed. The preparation of the experimental ‘Driver’ cDNAs and the control skeletal muscle cDNA was thus completed.

[0279] Adaptor Ligation

[0280] The adaptors were not ligated to the driver cDNA.

[0281] 1 μl of each Rsa I-digested experimental cDNA (from the Rsa I Digestion above) was diluted with 5 μl of sterile water. Preparation of the control skeletal muscle tester cDNA was then undertaken by briefly centrifuging the tube containing control DNA (Hae III-digest of ΦX174 DNA [3 ng/μl]) and diluting 2 μl of the DNA with 38 μl of sterile water (to 150 ng/ml). 1 μl of control skeletal muscle cDNA (from the Rsa I Digestion) was then mixed with 5 μl of the diluted ΦX174/Hae III DNA (150 ng/ml) in order to produce the control skeletal muscle tester cDNA.

[0282] Preparation of the Adaptor-ligated Tester cDNA

[0283] A ligation master mix was prepared by combining 3 μl of Sterile water, 2 μl of 5× ligation buffer and 1 μl T4 DNA ligase (400 units/μl) per reaction. 2 μl of adaptor 1 (10 μM) was then added to 2 μl of the diluted tester cDNA. To this, 6 μl of the ligation master mix was also added. The tube was therefore labelled Tester 1-1. In a separate tube, 2 μl of the adaptor 2R (10 μM) was mixed with 2 μl of the diluted tester cDNA and 6 μl of the master mix. This tube was named Tester 1-2.

[0284] 2 μl of Tester 1-1 and 2 μl of Tester 1-2 were then placed into fresh tubes. These would later be used as the unsubtracted tester control. The remainder of the contents of Tester 1-1 and Tester 1-2 tubes were then centrifuged briefly and incubated at 16° C. overnight. The ligation reaction was stopped by adding 1 μl of EDTA/glycogen mix and the samples were heated at 72° C. for, 5 min in order to inactivate the ligase. In doing so, preparation of the experimental and control skeletal muscle adaptor-ligated tester cDNAs was complete.

[0285] 1 μl from each Unsubtracted tester control was then removed and diluted into 1 ml of water. These samples were set aside as they were to be used later for PCR (see below). All of the samples were stored at −20° C.

[0286] Analysis of Ligation Efficiency

[0287] 1 μl of each ligated cDNA was diluted into 200 μl of water and the following reagents were then combined in four separate tubes:

| | Tube: | | | |
|---|---|---|---|---|
| Component | 1 | 2 | 3 | 4 |
| Tester 1-1 (ligated to Adaptor 1) | 1 | 1 | — | — |
| Tester 1-2 (ligated to Adaptor 2R) | — | — | 1 | 1 |
| G3PDH 3′ primer (10 μM) | 1 | 1 | 1 | 1 |
| G3PDH 5′ primer (10 μM) | — | 1 | — | 1 |
| PCR primer 1 (10 μM) | 1 | — | 1 | — |
| Total volume μl | 3 | 3 | 3 | 3 |

[0288] A master mix for all of the reaction tubes plus one additional tube was made up by adding 18.5 μl of sterile H₂O, 2.5 μl of 10× PCR reaction buffer, 0.5 μl of dNTP mix (10 mM), and 0.5 μl of 50× Advantage cDNA Polymerase Mix, per reaction, into a fresh tube. 22 μl of this master mix was then aliquotted into each of the 4 reaction tubes prepared above. The contents of the tubes were overlaid with 50 μl of mineral oil. The reaction mix was incubated in a thermal cycler at 75° C. for 5 min in order to extend the adaptors. The following protocol was then carried out immediately in a thermal cycler (Perkin-Elmer GeneAmp PCR Systems 2400): 94° C. for 30 sec (1 cycle), 94° C. 10 sec, 65° C. 30 sec and then 68° C. 2.5 min (25 cycles)

[0289] First Hybridisation

[0290] 1.5 μl of the Adaptor 1-ligated Tester 1-1 was combined with 1.5 μl of the Rsa I-digested driver cDNA, prepared earlier and 1 μl of 4× Hybridisation buffer. This process was then repeated combining the Adaptor 2R-ligated Tester 1-2 with the Rsa I-digested driver cDNA and 4× Hybridisation buffer. The samples were incubated in a thermal cycler at 98° C. for 1.5 min followed by incubation at 68° C. for 8 hr.

[0291] Second Hybridisation

[0292] 1 μl of Driver cDNA (i.e. the Rsa I-digested cDNA (see above)), 1 μl 4× Hybridisation buffer and 2 μl Sterile H₂O were all combined in a fresh tube. 1 μl of this mix was then removed and placed in a new tube, overlaid with 1 drop of mineral oil and incubated at 98° C. for 1.5 min in order to denature the driver. The following procedure was used to simultaneously mix the driver with hybridisation samples 1 and 2 (prepared in the first hybridisation), thus ensuring that the two hybridisation samples were mixed together only in the presence of freshly denatured driver: A micropipettor was set at 15 μl. The pipette tip was then touched onto the mineral oil/sample interface of the tube containing hybridisation sample 2. The entire sample was drawn partway into the tip before it was removed from the tube in order to draw a small amount of air into the tip. The pipette tip was then touched onto the interface of the tube containing the freshly denatured driver (i.e. the tip contained both samples separated by a small pocket of air) before the entire mixture was transferred to the tube containing hybridisation sample 1. The reaction was then incubated at 68° C. overnight. 200 μl of dilution buffer was added to the tube, which was then heated in a thermal cycler at 68° C. for 7 min. The product of this second hybridisation was stored at −20° C.

[0293] PCR Amplification

[0294] Seven PCR reactions were set up: (1) The forward-subtracted experimental cDNA, (2) the unsubtracted tester control (see preparation of the adaptor ligated tester cDNA), (3) the reverse-subtracted experimental cDNA, (4) the unsubtracted tester control for the reverse subtraction, (5) the subtracted control skeletal muscle cDNA, (6) the unsubtracted tester control for the control subtraction, and (7) the PCR control subtracted cDNA (provided in the kit). The PCR control subtracted cDNA was required to provide a positive PCR control as it contained a successfully subtracted mixture of Hae III-digested ΦX174 DNA.

[0295] The PCR templates were prepared by aliquotting 1 μl of each diluted cDNA (i.e., each subtracted sample from the second hybridisation and the corresponding diluted unsubtracted tester control produced by the adaptor ligation, see above) into an appropriately labelled tube. 1 μl of the PCR control subtracted cDNA was placed into a fresh tube. A master mix for all of the primary PCR tubes, plus one additional reaction, was then prepared by combining 19.5 μl of sterile water, 2.5 μl of 10× PCR reaction buffer, 0.5 μl of dNTP Mix (10 mM), 1.0 μl of PCR primer 1 (10 μM) and 0.5 μl of 50× Advantage cDNA Polymerase Mix. 24 μl of Master Mix was then aliquotted into each of the 7 reaction tubes prepared above and the mixture was overlaid with 50 μl of mineral oil, before being incubated in a thermal cycler at 75° C. for 5 min in order to extend the adaptors. Thermal cycling was then immediately started using the following protocol: 94° C. 25 sec (1 cycle), 94° C. 10 sec, 66° C. 30 sec and 72° C. 1.5 min (32 cycles).

[0296] 3 μl of each primary PCR mixture was then diluted in 27 μl of H₂O, 1 μl of each of these dilutions was then placed into a fresh tube.

[0297] A master mix for the secondary PCRs, (plus an additional reaction) was set up by combining 18.5 μl of sterile water, 2.5 μl of 10× PCR reaction buffer, 1.0 μl of Nested PCR primer 1 (10 μM), 1.0 μl of Nested PCR primer 2R (10 μM), 0.5 μl of dNTP Mix (10 mM) and 0.5 μl of 50× Advantage cDNA Polymerase Mix per reaction. 24 μl of this Master Mix was then added into each reaction tube containing the 1 μl diluted primary PCR mixture. The following PCR protocol was then carried out: 94° C. 10 sec, 68° C. 30 sec and 72° C. 1.5 min (12 cycles). The reaction products were then stored at −20° C.

[0298] Ligation into a Vector/Transformation & PCR

[0299] The products of the PCR amplification (enriched for differentially expressed cDNAs) were ligated into the pCR2.1-TOPO vector using a T/A cloning kit (Invitrogen), transformed into TOPO One Shot competent cells according to the manufacturers protocol and grown up on LB (Luria-Bertani) Agar plates overnight at 37° C. 1,000 colonies were then individually picked (using fresh sterile tips) and dipped into 5 μl of sterile water which had been aliquotted previously into 96 well PCR plates. The water/colonies were heated in a thermal cycler at 100° C. for 10 minutes in order to burst the cells, thus releasing the plasmids containing a differentially expressed cDNA insert. The 5 μl of water/plasmid was then used as a template in a PCR reaction (see below) using M13 Forward and Reverse primers (10 ng/μl), complementary to the M13 site present on either side of the cloning site on the vector. 5 μl of the PCR product was then run on a 2% agarose gel and stained by ethidium bromide. PCR products of an amplified insert were identified and 5 μl of the remainder of the PCR product (i.e. from the 15 μl that had not been run on the gel) was diluted 1/10 with water. 5 μl of the diluted PCR product was then used as a template in a sequencing reaction.

[0300] Sequencing

[0301] A sequencing reaction containing M13 primer (3.2 pmol/μl), ‘BigDye’ reaction mix (i.e. AmpliTaq® DNA polymerase, MgCl₂, buffer and fluorescent dNTPs [each of the four deoxynucleoside triphosphates is linked to a specific fluorescent donor dye which in turn is attached to a specific acceptor dye]) and cDNA template (diluted PCR product) was set up. The reaction was carried out on a thermal cycler for 25 cycles of 10 seconds at 96° C., 20 seconds at 50° C. and 4 minutes at 60° C. Each reaction product was then purified through a hydrated Centri-Sep column, and lyophilised. The pellets were resuspended in Template Supression Reagent and sequenced on an ABI Prism 310 Genetic Analyser. The analyser uses an ion laser to excite the specific donor dye that transfers its energy to the acceptor dye, which emits a specific energy spectrum that can be read by the sequencer.

[0302] The first 150 potentially upregulated genes were sequenced at Parke-Davis, Cambridge. The remaining 877 from both the forward and back subtractions were sequenced at the applicant's core sequencing facility in Ann Arbor, Mich., USA.

[0303] Bioinformatics

[0304] The sequencing results were analysed using the computer program CHROMAS in which the vector and adaptor sequences were clipped off, leaving only the nucleotide sequence of the differentially expressed gene. Each sequence was then checked for homology to known genes, Expressed Sequence Tags (ESTs) and Proteins using various Basic Local Alignment Search Tool (BLAST) searches against the Genbank sequence database at the National Centre for Biotechnology Information, Bethesda, Md., USA (NCBI).

[0305] Two lists were derived called STZup and STZdown that contain the nucleic acid sequences from the forward and back subtracted libraries respectively. In each list there are given accession numbers and descriptions for the known rat genes identified, and where available corresponding mouse or human genes. Sequences that are considered to be of interest are listed in Tables I-X.

[0306] References have been given where available for the sequences that have been found, and sequence listings have been given in the form in which they currently appear in publicly searchable databases e.g. the NCBI database (National Center for Biotechnology Information, National Library of Medicine, National Institutes of Health, Bethesda, Md., MD 20894, USA, www.ncbi.nlm.nih.gov). These sequence listings are given for the purposes of identification only. The invention includes the use of subsequently revised versions of the above sequences (which may incorporate small differences to the version set out herein) and homologous sequences or similar proteins in other species as determined by a high percentage identity (e.g. above 50%, preferably above 90%), length of alignment and functional equivalence.

[0307] References (see Tables I-X)

[0308] 1. Araki, R., Fujimori, A., Hamatani, K., Mita, K., Saito, T., Mori, M. Fukumura, R., Morimyo, M., Muto, M., Itoh, M. and Tatsumi, K., Nonsense mutation at Tyr-4046 in the DNA-dependent protein kinase catalytic subunit of severe combined immune deficiency mice Proc. Natl. Acad. Sci. U.S.A. 94 (6), 2438-2443 (1997)

[0309] 2. Barradeau, S., Imaizumi-Scherrer, T., Weiss, M. C. and Faust, D. M., Alternative 5′-exons of the mouse cAMP-dependent protein kinase subunit RIalpha gene are conserved and expressed in both a ubiquitous and tissue-restricted fashion, FEBS Lett. 476 (3), 272-276 (2000)

[0310] 3. Reddy, U. R., Phatak, S. and Pleasure, D., Human neural tissues express a truncated Ror1 receptor tyrosine kinase, lacking both extracellular and transmembrane domains Oncogene 13 (7), 1555-1559 (1996).

[0311] 4. Goto, K. and Kondo, H., A 104-kDa diacylglycerol kinase containing ankyrin-like repeats localizes in the cell nucleus Proc. Natl. Acad. Sci. U.S.A. 93 (20), 11196-11201 (1996)

[0312] 5. Letwin, K., Yee, S. P. and Pawson, T., Novel protein-tyrosine kinase cDNAs related to fps/fes and eph cloned using anti-phosphotyrosine antibody, Oncogene 3 (6), 621-627 (1988)

[0313] 6. Kitamura, K., Mizuno, Y., Sasaki, A., Yasui, A., Tsuiki, S. and Kikuchi, K., Molecular cloning and sequence analysis of cDNA for the catalytic subunit 1 alpha of rat kidney type 1 protein phosphatase, and detection of the gene expression at high levels in hepatoma cells and regenerating livers as compared to rat livers, J. Biochem. 109 (2), 307-310 (1991)

[0314] 7. Lombroso, P. J., Murdoch, G. and Lerner, M., Molecular characterization of a protein-tyrosine-phosphatase, enriched in striatum, Proc. Natl. Acad. Sci. U.S.A. 88 (16), 7242-7246 (1991)

[0315] 8. Hara, Y., Urayama, O., Kawakami, K., Nojima, H., Nagamune, H., Kojima, T., Ohta, T., Nagano, K. and Nakao, M., Primary structures of two types of alpha-subunit of rat brain Na+, K+, -ATPase deduced from cDNA sequences J. Biochem. 102 (1), 43-58 (1987).

[0316] 9. Akagi, H., Hirai, K. and Hishinuma, F., Cloning of a glycine receptor subtype expressed in rat brain and spinal cord during a specific period of neuronal development FEBS Lett. 281 (1-2), 160-166 (1991)

[0317] 10. Advani, R. J., Bae, H. R., Bock, J. B., Chao, D. S., Doung, Y. C., Prekeris, R., Yoo, J. S. and Scheller, R. H., Seven novel mammalian SNARE proteins localize to distinct membrane compartments, J. Biol. Chem. 273 (17), 10317-10324 (1998)

[0318] 11. Shull, G. E. and Greeb, J., Molecular cloning of two isoforms of the plasma membrane Ca2+-transporting ATPase from rat brain. Structural and functional domains exhibit similarity to Na+, K+- and other cation transport ATPases, J. Biol. Chem. 263 (18), 8646-8657 (1988)

[0319] 12. Peng, J. B., Chen, X. Z., Berger, U. V., Vassilev, P. M., Brown, E. M. and Hediger, M. A., A rat kidney-specific calcium transporter in the distal nephron, J. Biol. Chem. 275 (36), 28186-28194 (2000)

[0320] 13. Indiveri, C., Iacobazzi, V., Giangregorio, N. and Palmieri, F., The mitochondrial carnitine carrier protein: cDNA cloning, primary structure and comparison with other mitochondrial transport proteins, Biochem. J. 321 (Pt 3), 713-719 (1997).

[0321] 14. Ishida, N., Miura, N., Yoshioka, S. and Kawakita, M., Molecular cloning and characterization of a novel isoform of the human UDP-galactose transporter, and of related complementary DNAs belonging to the nucleotide-sugar transporter gene family J. Biochem. 120 (6), 1074-1078 (1996)

[0322] 15. Mayser, W., Schloss, P. and Betz, H. Primary structure and functional expression of a choline transporter expressed in the rat nervous system, FEBS Lett. 305 (1), 31-36 (1992)

[0323] 16. Nishimura, N., Nakamura, H., Takai, Y. and Sano, K., Molecular cloning and characterization of two rab GDI species from rat brain: brain-specific and ubiquitous types, J. Biol. Chem. 269 (19), 14191-14198 (1994)

[0324] 17. Pehrson, J. R. and Fried, V. A. MacroH2A, a core histone containing a large nonhistone region Science 257, 1398-1400 (1992)

[0325] 18. Zhong, Z., Wen, Z. and Darnell, J. E., Stat3: a STAT family member activated by tyrosine phosphorylation in response to epidermal growth factor and interleukin-6 Science 264, 95-98 (1994)

[0326] 19. Lagna, G., Kovelman, R., Sukegawa, J. and Roeder, R. G., Cloning and characterization of an evolutionarily divergent DNA-binding subunit of mammalian TFIIIC Mol. Cell. Biol. 14, 3053-3064 (1994)

[0327] 20. Amerik, A. Yu., Petukhova, G. V., Grigorenko, V. G., Lykov, I. P., Yarovoi, S. V., Lipkin, V. M. and Gorbalenya, A. E., Cloning and sequence analysis of cDNA for a human homolog of eubacterial ATP-dependent Lon proteases, FEBS Lett. 340 (1-2), 25-28 (1994)

[0328] 21. Sakimura, K., Kushiya, E., Obinata, M., Odani, S. and Takahashi, Y. Molecular cloning and the nucleotide sequence of cDNA for neuron-specific enolase messenger RNA of rat brain, Proc. Natl. Acad. Sci. U.S.A. 82, 7453-7457 (1985)

[0329] 22. Mori, K., Ogawa, Y., Ebihara, K., Tamura, N., Tashiro, K., Kuwahara, T., Mukoyama, M., Sugawara, A., Ozaki, S., Tanaka, I. and Nakao, K., Isolation and characterization of CA XIV, a novel membrane-bound carbonic anhydrase from mouse kidney, J. Biol. Chem. 274 (22), 15701-15705 (1999)

[0330] 23. Iwahara, S., Satoh, H., Song, D. X., Webb, J., Burlingame, A. L., Nagae, Y., and Muller-Eberhard, U., Purification, characterization, and cloning of a heme-binding protein (23 kDa) in rat liver cytosol Biochemistry 34 (41), 13398-13406 (1995)

[0331] 24. Sakakibara, J., Watanabe, R., Kanai, Y. and Ono, T., Molecular cloning and expression of rat squalene epoxidase, J. Biol. Chem. 270 (1), 17-20 (1995)

[0332] 25. Puga, A. and Oates, E., Isolation and nucleotide sequence of rat Cu/Zn superoxide dismutase cDNA clones, Free Radic. Res. Commun. 3, 337-347 (1987)

[0333] 26. Pave-Preux, M., Ferry, N., Bouguet, J., Hanoune, J. and Barouki, R., Nucleotide sequence and glucocorticoid regulation of the mRNAs for the isoenzymes of rat aspartate aminotransferase, J. Biol. Chem. 263, 17459-17466 (1988)

[0334] 27. Kholodilov, N. G., Neystat, M., Oo, T. F., Hutson, S. M. and Burke, R. E., TITLE Upregulation of cytosolic branched chain aminotransferase in substantia nigra following developmental striatal target injury, Brain Res. Mol. Brain Res. 75 (2), 281-286 (2000)

[0335] 28. Nakano, K., Matuda, S., Yamanaka, T., Tsubouchi, H., Nakagawa, S., Titani, K., Ohta, S. and Miyata, T. Purification and molecular cloning of succinyltransferase of the rat alpha-ketoglutarate dehydrogenase complex. Absence of a sequence motif of the putative E3 and/or E1 binding site, J. Biol. Chem. 266 (28), 19013-19017(1991)

[0336] 29. Kayukawa, K., Makino, Y., Yogosawa, S. and Tamura, T., A serine residue in the N-terminal acidic region of rat RPB6, one of the common subunits of RNA polymerases, is exclusively phosphorylated by casein kinase II in vitro, Gene 234 (1), 139-147 (1999)

[0337] 30. Shechter, I., Klinger, E., Rucker, M. L., Engstrom, R. G., Spirito, J. A., Islam, M. A., Boettcher, B. R. and Wienstein, D. B., Solubilization, purification and characterization of a truncated form of rat hepatic squalene synthetase, J. Biol. Chem. 267, 8628-8635 (1992).

[0338] 31. Nomura, T., Takizawa, M., Aoki, J., Arai, H., Inoue, K., Wakisaka, E., Yoshizuka, N., Imokawa, G., Dohmae, N., Takio, K., Hattori, M. and Matsuo, N., Purification, cDNA cloning, and expression of UDP-gal: glucosylceramide beta-1,4-galactosyltransferase from rat brain, J. Biol. Chem. 273 (22), 13570-13577 (1998)

[0339] 32. Mann, S. S. and Hammarback, J. A., Molecular characterization of light chain 3. A microtubule binding subunit of MAP1A and MAP1B, J. Biol. Chem. 269 (15), 11492-11497 (1994).

[0340] 33. Kuwano, Y. and Wool, I. G., The primary structure of rat ribosomal protein L3, Biochem. Biophys. Res. Commun. 187 (1), 58-64 (1992)

[0341] 34. Devi, K. R., Chan, Y. L. and Wool, I. G., The primary structure of rat ribosomal protein S4, Biochim. Biophys. Acta 1008 (2), 258-262 (1989)

[0342] 35. Janz, R., Hofmann, K. and Sudhof, T. C., SVOP, an evolutionarily conserved synaptic vesicle protein, suggests novel transport functions of synaptic vesicles, J. Neurosci. 18 (22), 9269-9281 (1998)

[0343] 36. Pettersson, M., Bessonova, M., Gu, H. F., Groop, L. C. and Jonsson, J. I., Characterization, chromosomal localization, and expression during hematopoietic differentiation of the gene encoding Arl6ip, ADP-ribosylation-like factor-6 interacting protein (ARL6), Genomics 68 (3), 351-354 (2000)

[0344] 37. Chan, Y. L., Olvera, J. and Wool, I. G., The primary structure of rat ribosomal protein L14, Biochem. Biophys. Res. Commun. 222 (2), 427-431 (1996)

[0345] 38. Pfister, K. K., Benashski, S. E., Dillman, J. F. III, Patel-King, R. S. and King, S. M., Identification and molecular characterization of the p24 dynactin light chain, Cell Motil. Cytoskeleton 41 (2), 154-167 (1998)

[0346] 39. Chan, Y. L., Suzuki, K. and Wool, I. G., The carboxyl extensions of two rat ubiquitin fusion proteins are ribosomal proteins S27a and L40, Biochem. Biophys. Res. Commun. 215 (2), 682-690 (1995)

[0347] 40. Sugimoto, K., Honda, S., Yamamoto, T., Ueki, T., Monden, M., Kaji, A., Matsumoto, K. and Nakamura, T., Molecular cloning and characterization of a newly identified member of the cadherin family, PB-cadherin, J. Biol. Chem. 271 (19), 11548-11556(1996)

[0348] 41. Betty, M., Harnish, S. W., Rhodes, K. J. and Cockett, M. I. Distribution of heterotrimeric G-protein beta and gamma subunits in the rat brain, Neuroscience 85 (2), 475-486 (1998)

[0349] 42. Brown, C. W., McHugh, K. M. and Lessard, J. L., cDNA sequence encoding cytoskeletal gamma-actin from rat, Nucleic Acids Res. 18 (17), 5312 (1990)

[0350] 43. Leung, T., How, B. E., Manser, E. and Lim, L., Germ cell beta-chimaerin, a new GTPase-activating protein for p21rac, is specifically expressed during the acrosomal assembly stage in rat testis, J. Biol. Chem. 268, 3813-3816 (1993)

[0351] 44. Epstein, P., Means, A. R. and Berchtold, M. W., Isolation of a rat parvalbumin gene and full length cDNA, J. Biol. Chem. 261, 5886-5891 (1986)

[0352] 45. Adachi, T., Schamel, W. W., Kim, K. M., Watanabe, T., Becker, B., Nielsen, P. J. and Reth, M., The specificity of association of the IgD molecule with the accessory proteins BAP31/BAP29 lies in the IgD transmembrane sequence, EMBO J. 15 (7), 1534-1541 (1996)

[0353] 46. Hirano, S., Ono, T., Yan, Q., Wang, X., Sonta, S. and Suzuki, S. T., Protocadherin 2C: a new member of the protocadherin 2 subfamily expressed in a redundant manner with OL-protocadherin in the developing brain, Biochem. Biophys. Res. Commun. 260 (3), 641-645 (1999)

[0354] 47. Suzuki, K., Olvera, J. and Wool, I. G., The primary structure of rat ribosomal protein L12, Biochem. Biophys. Res. Commun. 172 (1), 35-41 (1990)

[0355] 48. Li, L. and Cohen, S. N., Tsg101: a novel tumor susceptibility gene isolated by controlled homozygous functional knockout of allelic loci in mammalian cells, Cell 85 (3), 319-329 (1996)

[0356] 49. Atkinson, M. J., Freeman, M. W. and Kronenberg, H. M., Thymosin beta-4 is expressed in ROS 17/2.8 osteosarcoma cells in a regulated manner, Mol. Endocrinol. 4, 69-74 (1990)

[0357] 50. Devi, K. R. G., Chan, Y. -L. and Wool, I. G., The primary structure of rat ribosomal protein L18, DNA 7, 157-162 (1988)

[0358] 51. Thevananther, S., Kolli, A. H. and Devarajan, P., Identification of a novel ankyrin isoform (AnkG190) in kidney and lung that associates with the plasma membrane and binds alpha-Na, K-ATPase, J. Biol. Chem. 273 (37), 23952-23958 (1998).

[0359] 52. Liao, Y. -C., Tokes, Z., Lim, E., Lackey, A., Woo, C. H., Button, J. D. and Clawson, G. A., Cloning of rat ‘prion-related protein’ cDNA, Lab. Invest. 57, 370-374 (1987)

[0360] 53. Nakamura, H., Tanaka, T. and Ishikawa, K., Nucleotide sequence of cloned cDNA specific for rat ribosomal protein L7a, Nucleic Acids Res. 17 (12), 4875 (1989).

[0361] 54. Schaar, D. G., Varia, M. R., Elkabes, S., Ramakrishnan, L., Dreyfus, C. F. and Black, I. B. The identification of a novel cDNA preferentially expressed in the olfactory-limbic system of the adult rat, Brain Res. 721 (1-2), 217-228 (1996)

[0362] 55. Wieczorek, D. F. and Hughes, S. R., Developmentally regulated cDNA expressed exclusively in neural tissue, Brain Res. Mol. Brain Res. 10 (1), 33-41 (1991)

[0363] 56. Tjoelker, L. W., Seyfried, C. E., Eddy, R. L. Jr., Byers, M. G., Shows, T. B., Calderon, J., Schreiber, R. B. and Gray, P. W., Human, mouse, and rat calnexin cDNA cloning: identification of potential calcium binding motifs and gene localization to human chromosome 5, Biochemistry 33 (11), 3229-3236 (1994)

[0364] 57. Yoshikawa, K., Maruyama, K., Aizawa, T. and Yamamoto, A., A new species of enkephalin precursor mRNA with a distinct 5′-untranslated region in haploid germ cells, FEBS Lett. 246 (1-2), 193-196 (1989)

[0365] 58. Klar, A., Baldassare, M. and Jessell, T. M., F-spondin: A gene expressed at high levels in the floor plate encodes a secreted protein that promotes neural cell adhesion and neurite extension, Cell 69, 95-110 (1992)

[0366] 59. Reeben, M., Neuman, T., Palgi, J., Palm, K., Paalme, V. and Saarma, M., Characterization of the rat light neurofilament (NF-L) gene promoter and identification of NGF and cAMP responsive regions, J. Neurosci. Res. 40 (2), 177-188 (1995).

[0367] 60. Rees, W. D., Harries, D. N. and Fleming, J. V., Partial sequences of two genes regulated by amino acid supply identified by the use of RNA fingerprinting by arbitrarily primed PCR, J. Nutritional Biochem. 9, 136-141 (1998)

[0368] 61. Hart, M. C., Korshunova, Y. O. and Cooper, J. A., Vertebrates have conserved capping protein alpha isoforms with specific expression patterns, Cell Motil. Cytoskeleton 38 (2), 120-132 (1997)

[0369] 62. Seki, N., Ohira, M., Nagase, T., Ishikawa, K., Miyajima, N., Nakajima, D., Nomura, N. and Ohara, O. Characterization of cDNA clones in size-fractionated cDNA libraries from human brain, DNA Res. 4 (5), 345-349 (1997)

[0370] 63. DeGregori, J., Russ, A., von Melchner, H., Raybum, H., Priyaranjan, P., Jenkins, N. A., Copeland, N. G. and Ruley, H. E., A murine homolog of the yeast RNA1 gene is required for postimplantation development, Genes Dev. 8, 265-276 (1994)

[0371] 64. Meyer, H. A., Grau, H., Kraft, R., Kostka, S., Prehn, S., Kalies, K. U. and Hartmann, E., Mammalian Sec61 is associated with Sec62 and Sec63, J. Biol. Chem. 275 (19), 14550-14557 (2000)

[0372] 65. Gao, Y., Melki, R., Walden, P. D., Lewis, S. A., Ampe, C., Rommelaere, H., Vandekerckhove, J. and Cowan, N. J., A novel cochaperonin that modulates the ATPase activity of cytoplasmic chaperonin, J. Cell Biol. 125 (5), 989-996 (1994)

[0373] 66. Edelmann, W., Yang, K., Umar, A., Heyer, J., Lau, K., Fan, K., Liedtke, W., Cohen, P., Kane, M. K., Lipford, J. R., Yu, N., Crouse, G. F., Pollard, J. W., Kunkel, T., Lipkin, M., Kolodner, R. and Kucherlapati, R., Mutation in the mismatch repair gene Msh6 causes cancer susceptibility, Cell 91 (4), 467-477 (1997)

[0374] 67. Karthikeyan, L., Flad, M., Engel, M., Meyer-Puttlitz, B., Margolis, R. U. and Margolis, R. K., Immunocytochemical and in situ hybridization studies of the heparan sulfate proteoglycan, glypican, in nervous tissue, J. Cell. Sci. 107 (Pt 11), 3213-3222 (1994)

[0375] 68. Shimono, A., Okuda, T. and Kondoh, H., N-myc-dependent repression of ndr1, a gene identified by direct subtraction of whole mouse embryo cDNAs between wild type and N-myc mutant, Mech. Dev. 83 (1-2), 39-52 (1999)

[0376] 69. Kitaoka, Y., Olvera, J. and Wool, I. G., The primary structure of rat ribosomal protein S23, Biochem. Biophys. Res. Commun. 202 (1), 314-320 (1994)

[0377] 70. Takasawa, S., Yamamoto, H., Terazono, K. and Okamoto, H., Novel gene activated in rat insulinomas, Diabetes 35, 1178-1180 (1986)

[0378] 71. Kaprielian, Z., Cho, K. O., Hadjiargyrou, M. and Patterson, P. H., CD9, a major platelet cell surface glycoprotein, is a ROCA antigen and is expressed in the nervous system, J. Neurosci. 15 (1 Pt 2), 562-573 (1995)

[0379] 72. Collard, M. W. and Griswold, M. D., Biosynthesis and molecular cloning of sulfated glycoprotein 2 secreted by Rat Sertoli cells, Biochemistry 26, 3297-3303 (1987)

[0380] 73. Nagai, Y., Kojima, T., Muro, Y., Hachiya, T., Nishizawa, Y., Wakabayashi, T. and Hagiwara, M. Identification of a novel nuclear speckle-type protein, SPOP, FEBS Lett. 418 (1-2), 23-26 (1997)

[0381] 74. Brown, K. A., Leek, J. P., Lench, N. J., Moynihan, L. M., Markham, A. F. and Mueller, R. F., Human sequences homologous to the gene for the cochlear protein Ocp-II do not map to currently known non-syndromic hearing loss loci, Ann. Hum. Genet. 60 (Pt 5), 385-389 (1996)

[0382] 75. Wolff, T., O'Neill, R. E. and Palese, P., NSI-Binding protein (NSI-BP): a novel human protein that interacts with the influenza A virus nonstructural NS1 protein is relocalized in the nuclei of infected cells, J. Virol. 72 (9), 7170-7180 (1998)

[0383] 76. Lemischka, I. R., Farmer, S., Racaniello, V. R. and Sharp, P. A., Nucleotide sequence and evolution of a mammalian alpha-tubulin messenger RNA, J. Mol. Biol. 151 (1), 101-120 (1981).

[0384] 77. Morales, C. R., El-Alfy, M., Zhao, Q. and Igdoura, S. A., Expression and tissue distribution of rat sulfated glycoprotein-1 (prosaposin), J. Histochem. Cytochem. 44 (4), 327-337 (1996).

The application's sequence listing, which the Patent Office published only in electronic form, follows.

SEQUENCE LISTING (177 sequences)

SEQ ID NO: 1 - protein, 4128 aa, Mus musculus
  DNA-PKcs
MAEEGTGVRCWLLQLQEFLSAADRCSAAGASYQLIRSLGQECVLSTSSAVQALQISLVFSRDFGLLVFIRKSLSIEDFRDCREEALKFLCVFLEKIDQKVMHYSLDIKNTCTSVYTKDRTAKCKIPALDLLIKLLQILRSTRLMDEFKIGELFNKFYGELASKSKLPDTVLEKVYELLGVLGEVHPSEMINHSENLFRAFLGELKTQMTSTVREPKFPVLAGCLKGLSSLLCNFTKSMEEDPQTSKEIFGFTFKAIRPQIEMKRYAVPLAGLRLLTLHASQFTACLLDNYITLFEVLSKWCSHTNVELKKAAHSALESFLRQISFTVAEDAELHKSRLKYFMEQFYGIIRNTDSNNKELAIAIRGYGLFAGPCKVINAKDVDFMYVELIQRCKQMFLTHADASEDHVYQMPSFLQSIASVLLYLDTVPEVYTPVLEHLMVVQIDSFPQYSPKMQLVCCKAIIKLFLALSEKGPVHWNCISAVVHQGLIRICSKPVVLQKDVESRSDNRSASEEVRTGRWKVPTYKDYVDLFQHLLGCDQMEDFILGDETFLFVNSSLKSLNHLLYDEFIRSVLKIVEKLDLTLEKQTVGEQEDGSTADVWVIPTSDPAANLHPAKPSDFSALINLVEFCREILPRKHVGFFEPWVYSFAYELILQSTRLPLISGFYKLLSIAVKNARKIKYFEGISPKSLKHSPEDTEKYSCFALFAKFGKEVSVKMKQYKDELLASCLTFVLSLPHDIIELDVRAYVPALQMAFKLGLSHMPLAEIGLHALKEWSVHIDKSILQPYYKDILPCLDGYLNTSTLSDETKSHWGLSALSRAAQKGFNRHVVKHLKRTRNSSPDEALSLEEIRIKVVQILGSLGGQINKSLVTATSGERMKKYVAWDAERRLSFAVPFREMKPVIYLDVFLPRVTELALSASDRQTKVAACELLHSMVMFMLGRATQMPEGQGLPPMYQLYKHTFPVLLQLACDVDQVTRQLYEPLVMQLIHWLTNNKKFESQDTVALLEAILDGIVDPVDSTLRDFCGRCVQEFLKWSIKQTTPQQQEKSPVNSKSLFKRLYSLALHPNAFKRLGAALAFNHIYKEFREEGSLVEQFVFEALVTYMESLALAHEDEKSLGTVQQCCDAIDHLRRIIEKKHVSLNKAKKRRLPQGFPPLTSLCLLDLVEWLLAHCGRPQTECRHKSMELFYKFVPLLPGNKSPSLWLKDLIKKKGISFLINTFEGGASSSDQPAGILAQPTLVYLQGPISLRGVLQWLDLLLAALECYNTFIEKETVQGQEVLGAEVQSSLLKSVAFFLESIATHSARAVEQRFGSGAPGPPSLHEEEKYNYSKCTVLVRIMEFTTTLLIASPEDCKLLEKDLCNTNLMQVLVKMICEPMSLGFNIGDVQVMNHLPSICVNLLKALRKSPYRDMLETHLKEKVTVQSVEELCSINLCSSGARQERSKLLSILSACKQLHKAGFSHVISPSQSTALNHSVGMRLLSLVYKGIVPAEERQCLQSLDPSCKSLANGLLELAFGFGGLCDHLVSLLLNSAMLSTQYLGSSQRNISFSHGEYFYSLFSEVINSELLKNLDIAVSRLMESSSDNPKMVSTVLNGMLDTSFRDRAVQKHQGLKLATAILQNWRKCDSWWAPDSAPESKTTVLSLLAKMLQIDSALSFDTNHSSFSEIFTTYASLLADTKLGLHLKGQAIILLPFFTSLREGSLENLKHILEKLIVCNFPMKSDEFPPDSLKYNNYVDCMKKFLDALELSQSPMLFQLMTDILCREQRHIMEELFQTTFKRIARQSPCVTQLNLLESVYTMFRKADLPSNVTRQAFVDRSLLTLLWHCDLDTLKEFFSRIVVDAIDVLKSRFTKLNEFTFDTQITKKMCYYKMLAVMYSRLLKDDVHSKEAKINQAFHGSRVAEGNELTKTLLKLCHDAFTENMVGESQLLEKRRLYHCAAYNCAISLISCVFNELKFYQGFLFNEKPEKNLFIFENLIDLKRCYTFPIEVEVPMERKKKYIEIRKEARDAANGASGSPHYMSSLSYLTDSSLSEEMSQFDFSTGVQSYSYSSQDRKPTTGHFQRREHQDSMTQDDIMELEMDELNQHECMAPMIALIKHMQRNVIAPKGEEGSIPKDLPPWMKFLHDKLGNASVSLNICLFLAKLVINTEEVFRPYAKHWLSPLLQLAVCENNREGIHYMMVEIVATILSWTGLATPTGVPKDEVLANRLLRFLMKHVFHPKRAVFRHNLEIIKTLVECWKECLSIPYRLIFEKFSHKDPNSKDNSVGIQLLGIVIANNLPPYDPNCDITSAMYFEALVNNMSFVKYKEVYAAAAEVLGLILQYITERKHVIAELVCELVIKQLKQHQNTMEDKFIVCLNKIAKGFPPLADRFLNALFFLLPKFHGVMKTLCLEVVLCRAEEITGLYLQLKSKDFLQVMRHRDDERQKVCLDIVYKMVAKLKPIELRELLNPVVEFVSHPSPTCREQMYNILMWIHDNYRDQESQNDEDSQEIFKLAKDVLIQGLIDENVGLQLIIRNFWSHETRLPSNTLDRLLALNSLYSPKIEVHFLSLATNFLLEMTRMSPDYLNPIFEHPLSECEFQEYTIDPDWRFRSTVLTPMFIETQASPSILHTQTQEGPLSDQRQKPGQVRATQQQYDFTPTQASVERSSFDWLTGSSIDLLADHTVFSSETLSSSLLFSHKRTEKSQRMSCKSVGPDFGTKKLGLPDDEVDNQVKSGTPSQADILRLRRRFLKDREKLSLLYAKRGLMEQKLEKDIKSEFKMKQDAQVVLYRSYRHGDLPDIQIQHSGLITPLQAVAQKDPIIAKQLFSSLFSGILKEMNKFKTTSEKNIITQNLLQDFNRFLNTTFLFFPPFVSCIQEISCQHPDFLTLDPASVRVGCLASLQQPGGIRLLEEALLRLMPKEPPTKRVRGKTCLPPDVLRWMELAKLYRSIGEYDVLRGIFSSELGTTQDTQNALLAEARSDYCQAAKLYDEALNKLEWVDGEPTEAEKEFWELASLDCYNNLSKWKELEYCSTVNIVSENSLDLSKMWSEPFYQETYLPYVIRSKLKLLLQGEGNQSLLTFVDEAMNKELQKTVLELQYSQELSLLYILQDDIDRATYYIKNGIQIFMQNYSSIDVLLYRSRLAKLQSVQTLAEIEEFLSFICKHGDLSSLGPLRRLLKTWTSRYPDVVTDPMHIWDDIITNRCFFLSKIEERLTAPSGDHSMSVDEDEESIDREVYEPKEDVRCMLQSCRFTMKMKMIESAWKQSNFSLSMKLLKEMHKESKTREIWRVQWLHSYSQLNHCRSHTQSPREQVLNTLKTITLLDESDISNYLNKNIQASCDQSILLGTTCRIMADALSREPACLSDLEENKVNSILTLSGSNAENTETVITGLYQRAFHHLSKAVQSAEEETQLSCWGHEAAAERAHAYMTLVGFCDQQLRKVEESASQKTSAEMEAYPALVVEKMLRALKLNSSEARLKFPRLLQIIEQYSEETLNIMTKEISSIPCWQFIGWISHMMALLDKEEAIAVQHTVEEIADNYPQAIIYPFIISSESYSFKNTSSGHNNKAFVERIKSKLDHGEVIHSFINALDQLSNPDLLFKDWVSDTKDELGKNPVNKKNIEKLYERMYAALGDLRAPGLGPFRRRFIQAFGKEFVKSFGNGGSKLLTMKVDDFCKITGSLLVRMKKDSKLPGNLKEYSPWMSEFKAQFLKNELEIPGQYDGKSKPLPEYHVRISGFDERVKVMLSLRKPKRIVIRGHDEKEYPFLVKGGEDLRQDQRIEQIFEVMNAILSQDAACSQRNMQLRTYRVVPMTSRLGLIEWIENTMTLKDLLLSNMSQEEKVANNSDPKAPIRDYKDWLMKVSGKSDAGAYVLMYSRANRTETVVAFRRRESQVPPDLLKRAFVKMSTSPEAFLALRSHFASSHALLCISHWLLGIGDRHLNNFMVAMETGSVIGIDFGHAFGSATQFLPVPELMPFRLTRQFVSLMLPMKETGLMCTVMVHALRAFRSCAGLLTDTMEIFVKEPSFDWKSFEQTMLRKGGSWIQEINVTEKNWYPQHKIRYAKRKLAGANPAVITCDELYLGHEASSAFRSYTAVARGNRDYNIRAQEPESGLSEETQVKCLVDQATDPNILGRTWEGWEPWM

SEQ ID NO: 2 - DNA, 12653 bp, Mus musculus
  DNA-PKcs
atggcggaggagggaaccggcgtacggtgttggctactgcagctgcaggagttcctgtccgcagcagaccgctgcagtgctgccggggccagttaccagctgattcgtagtctggggcaggagtgcgtgctgagcactagctctgcagtgcaggcattgcagatttccttagttttttccagagactttggtttgcttgtgtttatccggaagtcgcttagcattgaggactttcgtgattgtagagaagaagccctaaagtttttatgtgttttcttagagaaaattgaccagaaggttatgcattactctcttgatattaagaatacttgtaccagtgtttacacaaaagatagaactgctaagtgtaaaattccagccttagaccttctgattaagttacttcagatactaagaagtaccagactcatggatgaatttaagattggagaattatttaacaaattctatggagaacttgcatcaaaatcaaaactacctgatacagttttagaaaaagtctatgagctcctgggagtattaggtgaagttcatcctagtgagatgataaaccattcagaaaacctgttccgagcttttctgggagaacttaagacccagatgacatccacagtaagagaacctaaatttcctgtcttagctggctgtctgaagggactatcctcacttctgtgcaacttcactaagtccatggaagaagatccccagacttcaaaggaaatttttggttttacatttaaagcaattcgtcctcagattgagatgaagcgatatgctgtgcccttagctggcctacgattacttaccctgcatgcatctcaattcactgcctgccttctggacaactatattactttatttgaagtactgtctaagtggtgtagccatacaaatgtggaattaaaaaaagctgcacattcagccctggagtccttcctgagacagatttcgtttactgtggcagaagatgcagagttgcataagagcaggctgaagtactttatggaacagttctatggaatcatcagaaatacagactcgaacaacaaggaattagccattgctattcgcggatatggactatttgcaggaccttgcaaggttataaatgcaaaagatgttgacttcatgtacgtggagctcattcagcgctgtaagcagatgttcctcacccacgcagatgcttctgaggatcatgtttaccagatgccaagtttccttcagtctattgcaagtgtcttgctttaccttgacacggttccggaggtatatactccagtactggaacatctcatggtggtacagatagacagcttccctcagtatagtcccaaaatgcagttggtgtgctgtaaagcaataataaaacttttcctagccttatcagagaaaggaccagttcactggaattgcattagtgctgtggtgcaccaaggtttaattagaatatgttctaaaccagtggtccttcaaaaggatgttgagtctaggtctgataaccgttcggcctccgaggaagtcagaactggcaggtggaaagtacctacgtacaaagactatgtggatctttttcagcatcttttaggctgtgaccagatggaggattttattttaggagatgaaacatttctctttgtgaactcctcccttaaaagtctgaatcatttactctatgatgaatttataagatcagttttgaagattgtggaaaaattggatcttacactggaaaaacagactgttggagagcaggaggatggaagcactgctgatgtctgggtgatcccaacttcagatccagcagctaatttgcaccctgctaaaccaagtgatttttcagctctcattaacctggtggagttttgcagggagattcttcctaggaaacatgtaggcttttttgagccatgggtgtactcatttgcatatgagttaattttgcagtctacacgattgccactcatcagtggtttctacaaattgctttctattgcagtgaaaaatgccaggaaaataaaatattttgagggaatcagcccaaagagtctgaaacattctcctgaagatacagaaaagtattcttgctttgctttatttgcaaagtttggcaaagaggtatcagttaaaatgaagcaatacaaggatgaactgttggcctcttgtttaacctttgttctgtccttgccacatgacatcattgaacttgatgttagagcctacgttcctgcattgcagatggctttcaagctgggcctgagccatatgccactggcagaaataggtctacatgcccttaaagagtggtcagttcacattgataagtctatactgcagccttactacaaagacattctcccctgccttgatggatatctgaatacttcaaccttatcagatgaaaccaagagccactggggattgtctgcactttctcgggctgcccagaagggatttaatagacatgtagtgaagcatctaaaaaggactagaaatagttcgcctgatgaagcactgtccttagaagagataagaattaaagtagtacaaatacttggctctctgggaggacaaataaacaaaagccttgtaacagctacatccggagaaaggatgaagaagtacgtggcgtgggatgcggagagaagactcagctttgcagtgcccttcagagagatgaagcctgtcatttatctggatgtctttctgcctcgggtcactgaattggctctttctgctagcgaccgacaaactaaagtagcagcttgtgaactgttacacagcatggttatgtttatgttgggaagagcgactcagatgcctgaaggtcaggggttgccgcccatgtaccagctttataagcacacgtttcctgtgctgcttcaacttgcgtgtgatgtggatcaagtgacaaggcagctctatgaaccgcttgttatgcagctgatccactggttgactaacaataaaaaatttgaaagtcaagatactgttgccttattagaagccatactggatggtattgtggaccctgttgacagtactttaagagatttttgtggacggtgcgttcaagaattcctcaaatggtccattaagcaaacaacacctcagcagcaagagaagagtccagtaaacagcaagtcacttttcaagcggctctacagccttgcacttcatcctaatgctttcaagaggctaggtgcagcacttgcttttaatcacatctacaaggaattcagggaagaaggatccctggtagaacagtttgtgtttgaagccttagtgacatatatggaaagtctggccttggcacatgaagatgagaaatccttaggcacagttcagcagtgctgtgatgccatcgatcacctaagacgcatcattgaaaagaagcatgtctctttaaacaaagcaaaaaagcgacgtttgccacagggatttccacctttgacatcattatgtttattggatctggtcgagtggcttttggctcactgtggaaggccccagacagaatgtcgacacaagtccatggaactcttttataaatttgttcctttactgccaggcaacaaatccccttctttatggttgaaagaccttataaaaaagaaaggtatttcttttctcataaacacatttgaaggaggggcaagcagcagtgatcagccagcaggcattcttgctcagccaaccctcgtctacttacaagggccaatcagcctgcgaggagtgctacaatggctggacctcctccttgcagcactggagtgctacaacacatttattgagaaggagactgtgcaaggacaagaggtcctgggtgctgaagtacagtcttcacttttgaagtcagtggctttctttttagaaagcatagcaacccatagcgctagagcagtagaacaacgctttggctccggggcgccgggccctcccagcctccacgaggaagagaagtacaattacagcaagtgcacagtcttagtccggatcatggaattcaccacaaccctgctcatcgcctctccagaggactgcaagctcctggagaaggacttgtgtaatacaaatcttatgcaggtcttagtgaaaatgatctgtgagcccatgagcttaggtttcaatattggcgatgtccaggttatgaaccatcttcccagcatttgtgtgaacctgctgaaagctcttaggaagtccccgtacagagacatgctggagactcacctgaaggagaaagtgacagtacagagtgttgaagagctctgttccattaacttgtgtagctctggggctcgccaagaaaggtctaagttactttctatcttatcagcctgtaaacagcttcacaaagctggtttctctcatgttatatcaccatctcagtctacagcattgaaccattccgttggcatgagactgctgtccttggtttataaaggcattgtgcctgcagaggaaaggcagtgcctgcagtctttggaccccagctgtaagagcctagccaatggactcctggaattagcctttggttttggaggactgtgtgaccatcttgtgagtttgctcctgaattcggcaatgctgtctacacaatatctgggcagttcacagagaaatattagcttctcccatggggaatatttctacagtttgttctcagaagtgatcaacagtgagctgttgaagaatcttgatattgctgtatcaaggctcatggagtcatcttcggataatcccaaaatggtgagcactgttttaaatggtatgctagacacaagcttcagggatcgagctgttcagaaacaccaaggactgaagcttgcaactgcaattctgcagaactggaggaagtgtgattcatggtgggccccagattctgccccagagagcaaaacaactgtgctgtctttgctggcaaagatgttgcagattgattcagctttatcttttgatacaaatcacagctcattttctgaaatcttcacaacatacgctagtctacttgctgatacaaagttgggtctacacttaaagggccaagctatcattcttcttccattcttcaccagtcttagagaaggcagtctagaaaacctaaagcatattctggaaaaactcattgtttgcaatttccccatgaagtctgatgaatttcctcctgattccctaaagtacaataattatgtggactgcatgaaaaagtttctagatgcactggagttatctcagagtcctatgttgtttcagttgatgacagatatactttgtcgggaacagcgacatattatggaagaattgttccaaaccactttcaaaaggattgctaggcagagtccatgtgtcacacagttaaatcttctggaaagtgtgtacacaatgttccggaaggctgacctcccttcaaatgtcactcgccaggcatttgtagatcgctctctcctcaccttgttgtggcactgtgacttggacacactgaaagagttctttagtagaattgtggtagatgccattgatgtgttgaagtccagatttacaaagctaaatgaatttacttttgacactcaaatcaccaagaagatgtgctattacaagatgctagctgtgatgtattctcgtcttttaaaagatgatgttcactctaaagaagctaaaattaatcaagcttttcatggctcccgtgttgcagaaggaaatgaactcacaaagacacttcttaagttgtgccatgatgcatttacagagaacatggtgggggagagccagttgctggagaagagaagactttatcattgtgctgcatacaactgtgccatttctctgataagctgtgtcttcaatgagttgaaattttaccaaggttttttatttaatgaaaaaccagaaaagaacttgtttatttttgaaaatttgatagacctgaaacgttgctatacatttcctatagaagttgaggttcctatggaaagaaagaaaaagtacattgaaattaggaaagaggccagggatgcagcaaatggggcttcaggcagtcctcattatatgtcttcattgtcatatttgacagacagtagcctaagtgaagaaatgagtcaatttgatttctcaactggagttcagagctattcatacagttctcaagatcgtaaacctaccactggccattttcagagacgggagcatcaagattccatgacccaggatgacatcatggagttagagatggatgagctcaatcaacatgaatgtatggctcccatgatagccctgattaagcacatgcagagaaatgtgattgcacctaagggagaagagggttcaataccaaaagatcttccaccgtggatgaaatttcttcatgacaaactaggaaatgcatcagtatctttaaatatctgtctcttcttagccaagcttgttattaatacagaagaggtctttcgcccttatgcaaagcactggctcagccccctgctacagctagctgtttgcgagaacaacagagaaggaattcactacatgatggtagaaatagtagctaccattctctcttggactggcttggctacacctacaggagtccctaaagatgaagtgttagcaaatcgattgcttcgttttctaatgaagcatgtcttccatcccaaaagagctgtgtttaggcacaaccttgaaattattaaaacccttgttgaatgctggaaggagtgtctttccatcccttacaggttaatatttgaaaaattttcccataaggaccctaattctaaagacaattctgtgggaattcagttattaggcattgtgatagctaataacttgcctccctatgacccaaattgtgacataaccagtgccatgtattttgaagctttagtcaataacatgtcctttgtgaagtataaagaagtatatgcagctgcagcagaagttttaggacttattcttcaatacattactgagagaaaacacgtgatagcagagttggtatgtgaactggttataaaacaactgaagcaacatcaaaatactatggaagacaaatttattgtttgcttaaacaaaatagcgaagggcttccctcctcttgctgacaggttcttgaatgctttgttctttctgctgccaaaatttcatggagtaatgaagacactttgtctggaagttgtactttgtcgagcagaggagatcacaggcctatacttacagttaaagagtaaagactttcttcaagtcatgagacatagagatgatgaaagacaaaaggtgtgtttggatatagtttataagatggtggcaaaattaaaaccaatagaactccgagaacttctgaatcctgttgtggaatttgtttcccatccttctccaacatgtagagaacaaatgtataatattcttatgtggattcatgacaattacagagatcaagagagtcaaaatgatgaagattcccaggaaatatttaaactggcaaaagatgtactgattcaaggactgatcgacgagaacgttggactccaactaattattcggaatttctggagccatgaaaccagattgccttccaatacattggaccgattgctggcattaaattctttatattcccccaagatagaagtccactttttaagtttagcaacaaactttctgcttgaaatgaccaggatgagcccagattatctaaaccccatttttgagcatcctctgtcagaatgtgaatttcaggaatatactatagatcctgactggcgttttcgtagtactgttcttactccgatgtttattgagacccaggcctctccaagtattctccatacccaaacccaagaagggcccctctcagaccaaaggcagaagcctggacaagtgcgggccacccaacaacaatatgatttcactccaacacaagcttcagttgaaaggagctcatttgattggctgactgggagcagcattgacctactggcggatcacaccgtcttctcttcagagaccttgtcttcctccttgctgttttcccacaaaaggactgaaaagtcacagagaatgtcttgtaagtcagtaggaccggactttggaacaaaaaagctgggccttcctgatgatgaggtggataaccaagtgaaaagtggcactccgagccaggcagatattctgagattgcgcagaagatttttaaaggaccgagaaaagttgagtttgctgtatgccaaaaggggcctcatggaacaaaaactagagaaggatatcaagagtgagtttaaaatgaagcaggatgcgcaggttgttctgtacagaagttatcgtcatggcgatcttcctgatatccagatccagcacagtggtctgatcacccccttgcaggctgtggcccagaaagacccaataattgcaaaacaactcttcagcagcttgttttctgggattttgaaagaaatgaataaatttaagacaacatctgaaaagaacatcatcactcaaaatttgctccaagatttcaaccgcttccttaatacaactttcttgttctttccaccctttgtctcttgcatccaggaaataagttgccaacacccagacttcctgacacttgacccagcctcagttcgagtgggatgcctggctagtctgcagcagccgggaggtatccgtcttctggaagaggccctactccggctgatgcccaaggaaccacccaccaaaagagttcggggcaagacttgcttgcctcccgatgttctccggtggatggaacttgctaaactctatcgttcgattggggagtatgatgttctccgtggcatttttagcagtgagttaggaacaacgcaggacactcagaacgcactattagcagaagctagaagtgattattgtcaagctgctaagttgtatgatgaggctttaaataaactggagtgggtggatggtgaacccacagaagctgagaaggagttttgggagctggcatcgcttgactgttacaacaacctctctaaatggaaagaacttgagtactgttctacagtcaatatagtcagtgagaactctcttgacctaagtaaaatgtggagtgaaccattttatcaggagacgtatctgccatatgtgatccgtagcaaactaaagctcctgcttcaaggagaaggcaaccaatctctgctaacatttgtggatgaagccatgaacaaggagctgcagaagacggtcctggagcttcagtatagtcaagagctgagtcttctttacatcttgcaggatgatattgacagagccacatactacattaaaaatggcattcagattttcatgcaaaattattctagtattgatgttctgttatatagaagtagactcgccaagttacagtctgtacagactttagcagaaattgaggagttcctaagttttatatgtaaacatggtgacttatcatctctgggtcccctaaggagacttctaaaaacctggaccagcagatacccagatgttgtgacagacccaatgcacatctgggatgacatcatcacaaatcgctgcttctttctcagtaaaatagaagagagactgactgctccttcaggagatcacagtatgagtgtggatgaggatgaagagtccattgacagggaagtgtacgagccaaaggaagatgttcgttgcatgcttcagagctgcagattcaccatgaaaatgaagatgatagaaagcgcctggaagcagagtaatttctcactctccatgaaactcctgaaagagatgcataaagaatcaaaaacaagagaaatttggcgagtgcagtggttgcatagttactcccagctgaaccactgccggagccacactcagagccctcgggaacaagtcctcaatacgctcaaaaccatcacgctgttggatgaaagtgatatttcaaactacttaaataaaaacattcaggcctcttgtgaccagagcattctcttgggcacaacttgcagaatcatggctgatgctctcagcagagagccagcctgcctgtctgacctggaggagaacaaggtgaactcaatcttgacactttccggatctaatgcagagaacacagagacggtaatcacgggtctgtaccagagagcattccatcacctctccaaggccgtgcagtcagctgaagaggaaacccagctttcctgctggggccatgaggctgctgctgagcgggcccatgcttatatgacactggtaggcttctgtgaccaacaactccgaaaggtagaagagagtgcctcacagaagacaagtgcagaaatggaagcatatccagcacttgtggtggaaaaaatgctgagagcattaaagttaaactcttctgaagccaggctgaaatttcctagattacttcagattatagagcagtattcagaggagaccttaaacataatgacaaaagagatttcatctattccttgctggcagttcattggctggatcagccacatgatggccttactggacaaagaggaagctattgcagtacaacatactgtggaagaaattgctgataactacccacaggccattatctacccttttataataagcagcgaaagctactcctttaaaaacacttcttctggtcataacaataaagcatttgttgagaggataaaaagtaaacttgatcacggagaagtgattcacagttttattaacgccttagaccagctctccaatcctgacctgctcttcaaggactgggtttctgatacaaaagatgaactaggaaagaatcctgtgaataagaaaaatattgaaaagttgtatgaaaggatgtatgctgccttgggtgaccttcgtgctccaggcctggggccctttcggaggaggttcatacaggcgtttgggaaagaatttgtcaagagctttgggaatggtggttctaagctgcttacaatgaaggtcgatgacttttgtaagatcactggctcgctacttgtaaggatgaaaaaagactcaaagctacctgggaacctgaaagagtattccccctggatgagtgagttcaaagcgcagttcctgaaaaatgaactggagattcctggacaatatgatggaaaaagcaaaccactgcctgaatatcacgtgcggatctctggatttgatgagcgggtaaaagtgatgctctccttgaggaagccaaagcgcattgttattcgaggccatgatgaaaaggaatacccgttcctggtaaaaggtggtgaggacctccgtcaagaccagcgcattgagcagatctttgaggtcatgaatgccattctctctcaggatgctgcctgcagtcagagaaacatgcagttaaggacttaccgtgtcgtgccaatgacctctagattaggattaattgaatggattgaaaatactatgaccttgaaggatcttcttttgagtaatatgtcacaagaggagaaagtggctaataacagtgaccccaaagcgccgatccgtgactataaagactggctgatgaaagtgtcggggaaaagcgatgctggagcctatgtgctaatgtacagccgagctaaccgtacagaaacagttgtagctttcagaagaagggaaagtcaagtgccgcctgacctcttaaagcgggcctttgtaaagatgagcaccagccctgaggccttcctggcactgcgttcccactttgccagctcccatgcactgctgtgcatcagccactggctcctcgggattggagacagacacctgaacaatttcatggtggccatggagacaggcagtgtgattggaattgactttggacatgcgtttggatcagctactcagtttcttccagtccctgagttgatgccttttcgtctaacccgccaatttgtcagtctcatgttgccaatgaaagaaacgggtctcatgtgcacggtcatggtgcatgcactgagggctttccgctcttgtgcaggtctgctcactgacaccatggaaatttttgtgaaggaaccctcctttgattggaagagttttgagcagacaatgctgagaaaaggaggatcatggattcaagaaataaatgtaacggaaaagaattggtatccacaacataaaatacgctatgctaagagaaagttagcaggggccaacccagctgttataacttgtgatgagctatatctaggccatgaagcttcatccgcctttaggagttatacagctgtagctcgaggcaacagagactacaacattcgtgcacaagagccagagagtgggctttcagaagagactcaagtgaagtgcttggtggaccaggccacagaccccaatatccttggcaggacttgggaaggatgggagccctggatgtaaagtctgtggtgtcaccaatcataaagcattctgtctccgagaggacctcctagaccttcgctgacagcagtatatttctgacagacagaggaaatctactttatggtgctggcgagatggtcagataaaggcatttgttaccaatgctaatggcctaactaacttcaatcccagaaacccatattggaggcagtgaaccaactccaggaagttgtcctttgacctccacacatgtaaaaaataaagaatatgacaaatataaaaaa

SEQ ID NO: 3 - protein, 124 aa, Rattus norvegicus
  cAMP-dependent protein kinase regulatory subunit RIalpha
SLDKWERLTVADALEPVQFEDGQKIVVQGEPGDEFFIILEGTAAVLQRRSENEEFVEVGRLGPSDYFGEIALLMNRPRAATVVARGPLKCVKLDRPRFERVLGPCSDILKRNIQQYNSFVSLSV

SEQ ID NO: 4 - DNA, 5699 bp, Rattus norvegicus
  cAMP-dependent protein kinase regulatory subunit RIalpha
aattcttttgattcttctatttcagagtctctggacaagtgggagcgtctcacagtagccgatgcattggagcctgtccagtttgaagatggacagaagatcgtggtgcaaggagagccgggggatgagttcttcatcattttagaggtagagagctctgcgagtgactccttaccatgcgtcacctaaaggaggggcagccagttctgatttgtagctttagttttatttagtcgttatcttttacttcagaatacagcttgctgtgtatagtctgctacagttttaaggaattagagtcagaatcctgcaggggccctagacatgattggtgagatggctctctactacactaaaaagcccctcagccataacagatacggtgattctgagccaaagtgcttaggctagttagtaatgattgacaattctaaaagtcactgttactgaaacatctccctatcatcctgcttgccaagcaggtccagatggcagcttcagagtctgaactcttgtcgcactgcagatgcagccatggagatgtgagccctgagtgtgatagtctttaaaatcttatttccaaagatgcagcaggcttgagcttgaccctttacgtaaactttactcaccggagtctgaactcctttgttagtgcctgagcttgatacgagccttgatagcggggtggatgctggttcagtggaagtcagcgttgaaataactgctcagttcactcaggaaccggcgattgcacagtatgtgttaggaccgtgtgtttagcttcttgcgttggtgtgattacagggcacagctgctgtgctgcagcgtcggtcagaaaacgaagaatttgttgaagtgggacgactggggccttctgattattttggtatgttaaatttcttcataaatacatggtttaaggatctgtgggacagtgtagtttcccataattagttttgttttctttcctttacttagttctggggcagagtgtggcctggaactcactctgtagaccaggctgcccacaaactcagagacccacctgtctccatttctagagtgatgggattgaatgtaggcacccccacaccctgcctttattgtttttgagacagggtctttggtaacagtgcagaccggccttcttagatctgccttagttagcctcctaagtgttggggttatagtcatgatacctggtagatttcttaacctatactctttcttgtttctcagagaagtactgtaacattaactttattcagttaatagatgagcacagaccaagcatgcatgcgcacacgcacttgcgcttatgtcctacatagcctcgactgcctggacttcattgtacagtgaagcttgttctaactggtcaccttcctgcctctggctcatgagtgttggtttgtaggcatgactgtaggggctgtgttatctatttgctagtaatactttttaatgtacaaatgttgtgtggcctctactaagttagtagggaagttgcatctttgttcacttgctcaggagtggaccctttaaggaaatagcttccataggtgatagtcgttactgtctcttttccaggtgaaattgccctgctgatgaatcgtcctcgggctgccactgtggttgcccggggccctttgaagtgcgttaagttggaccggcctcggtttgaacgcgtccttggcccgtgctcagacatcctcaagcggaacatccagcagtacaacagcttcgtgtccctgtccgtctgacccgcgcctcctgtgcctcctccccagtccatgcttcactcacgcagactgctttctctccctagccgcagcgcccagtggccactgcttcacagcttcttgtctctttatactaaaagttgctttattgcaccatttttcattgggagcgttattaaatgctcattcacaaataaatagagagttgtatggacttggctgtcaccgcttctctgtgcagtgctcgtgttcaacctgggcagcaagtgccgcgctttttgctgagggcggtccctgcaccactgaattaccgtaatgatgtaatagctgtgcagggcttttaagtgacacaggtttccatttccatatgacacaagtgacatacttagactgtggccatgtttgctgtatttctttatagagtaaatgattttaacctttaaggattagaagaatgaatatagaaaactcctagcacagtagaaagacatctgcctgtaattaagctagtttaagtgtgggagtgcccatgttttgctaatcaccaggcactgcagctagttcagccctctcagcctggtttggtgtgtctgttgctagtgtttcttctccaaccctgaaatgttttggtgtggctggccgtctatccctgcctttaagtttgaaatcatttgtagatggcaagtactggttgtgacttcactgcacctgtctgagctcacagacgctgataactttatttatccagctggtgccaaatcctgaggatgagacacagaaatgtgagaatttgaggtcttcactctggggagttaaccgtggttaactcgtgtgatctgccctcagttacagactagggcgttggaattactgagaatagacaaatagagcaagctccagagagaaggggatggaggcagtgctgctgaaggtggatggcggtcaggtgtccagaagcaggaagctgggtctgtcccctgggtttctgttaggaacagtggtggggtgtgaccgtgttgtggtctgaaaggccaccccgctgagtcctgccttttcctgtctaaccttgaatttctctggtaaactttctttattgttttttgtttgtgtgtgtgtgtttaaagtaaacttgtgttcttgactgtatttcagtattttccagccttatgtgttacattattccagtgataacccaacagtttatttttattactgttattttttaaacaaaattcacagttcgtaacgaggcacacttatcttgtgatttctgtataatgtcgggttctatttgggagtgactgcgttttcatgtgtgtgcaagtggttctgattaataattccctccctccctttcccagttaacttaaattgttggttatggtagatttttttcttggtagattgaaaagcttctagattgttactaatttgggaaaaagtttcatttaggttttagcatgggatagaaagctaccttgttgccatatctaaaacttccataatctatattaaatgagggttttctgtacttactttgtggttggctatctttttttatatttaaaaaaataaaaattatgttactagcttaaagcttaatttgatatttgtttaaatgccaaaaatgtacgtatgtgaatgatgtagaacgccataaaatgcatttcatgtgtatatacccccttggtctgtacggagataaacacctgctttctaagagttccatgctagcttacaagttacgcccttttgtcgttttactcttagacttttcaagataagtctaaatttaaaaattaccacatttaaagctttatctttgtgcaatttaaatatcagtcagaagtcgtggttggcatactgtgtctttgtggactcttggcaccattgtctctggatgggtgggcgaatttaagcaatctgctgagaaagcagagctggccaaagggacagttgctgtttcctggacactagtctgatatactctgtgctaatctaatcgctgttcttttgttacagactgtctcaatggtaggtcacagaataaaaaagatgaaataatttaaattcttaaacgaatcagtttttcttcctttcttccttttcttcctctgtttttccccaaaatttcagtgggaaagaatgaaagtgaattttgggattagaattttgaaaaagtaatgtatttatttttttttaaaatacattccaattcagtttgtcaaagggtggatttcaaaaccttgcttttatgggtgtgggacagactcactaacaagctctggaaggggaaggttctgtccaaagccatggcgttgttttcacaggacagacctgtctgtgtgccttagggcttcacagactggattggactcctggttttacaagatccacctgtagctgcttgaggatcttacacatcaagatttgtttctgtttcttcctggagtttgaagagtgagcacatgagttactctggtgataactgggatcttcacacgcagggaagctggagttagtgctggagagtggctgagttctgctgcttaagctctgcctggccaggttcagaagtcccttcctctcaccagctgcatgtccttcttttaaaatttggcccaggatgcagtttactgttgtgttgacattctgaaattgaattagcacaatggcagtggcgtcactttgtctccaacctcaaagatttggaccctttgtgaactttggcaaagccctgccagtgcacttccgggtggaccaaaaccatgctaaccatttaatttgccctccatcacatttgccaaggggaaacacaaatctctcccttcttacatttggggtatttctgtagaaaccatcatttttgtgtacatacacagctaaaatttgtttcttggcataactttagaactgtgacatcatcatgagtccctgtaagaacaagaagtagctttgtgattttaaaaaagtcaccactagatggagagctttttctttatgctcagctttgccaacctcagatgagtcgcagctgtttctcagtctgcagatcctgcatttgcgtgtctccctacttggtacaatgtaagtgtgaccccgagactgccacaccagaagccctctgggacctgagctgcactcgcagagaaaaacgtgattatcccttgccttcccacccgaggctgagtgaggtctgcctcacctcatctgtggccatgtcacctgggggcctcctgcaccacgcttgtgtgggggccctcgtgcctgctgttgatgaggtcactcggtatttagaaggcctcccaggatagtgctcatgggctgactcgcgttcctgagtttgagaaagctgtctcttactgtgaacgtgcagcagtagacagatgcagtgttaaagaaccagcaatgtaaagacatgatctttaccacacaagatgagattctgtagtaatgggtcagtgaagttagactagagaatcctaagaacctgacctcatacttctcctaggggcagtaataatttaccagttaagaggccaggagtttaataggacagaattgctccctataagagaattgacttatccttagataggtccagcatttggagaatgctgtggcatatccctccaaactgatccctaccagttcacacagtcttggtttttttatttgcttgccagtggtaacatggaaagttttcacatagactcagaatattttttttccccatgggaagttgagcaatgattcagagtgcgtaagctgtaagaactccacactctgagaatggaatgtttttgtcttctggtgcttttgaaaaatgctgctcttagctttatgttgttgttgttagaaaaacagatagttaaaagtagcctatatagttatccatcatagaatcaagccgagttactttggttttgaaatgtaaagcagatttcagagtctcga

SEQ ID NO: 5 - protein, 388 aa, Homo sapiens
  Protein tyrosine kinase t-Ror1
MLFEYINQGDLHEFLIMRSPHSDVGCSSDEDGTVKSSLDHGDFLHIAIQIAAGMEYLSSHFFVHKDLAARNILIGEQLHVKISDLGLSREIYSADYYRVQSKSLLPIRWMPPEAIMYGKFSSDSDIWSFGVVLWEIFSFGLQPYYGFSNQEVIEMVRKRQLLPCSEDCPPRMYSLMTECWNEIPSRRPRFKDIHVRLRSWEGLSSHTSSTTPSGGNATTQTTSLSASPVSNLSNPRYPNYMFPSQGITPQGQIAGFIGPPIPQNQRFIPINGYPIPPGYAAFPAAHYQPTGPPRVIQHCPPPKSRSPSSASGSTSTGHVTSLPSSGSNQEANIPLLPHMSIPNHPGGMGITVFGNKSQKPYKIDSKQASLLGDANIHGHTESMISAEL

SEQ ID NO: 6 - DNA, 2373 bp, Homo sapiens
  Protein tyrosine kinase t-Ror1
gcacgagcggttctgagcattagtttgagaactcgttcccgaatgtgctttcctccctctcccctgcccacctcaagtttaataaataaggttgtacttttcttactataaaataaatgtctgtaactgctgtgcactgctgtaaacttgttagagaaaaaaataacctgcatgtgggctcctcagttattgagtttttgtgatcctatctcagtctgggggggaacattctcaagaggtgaaatacagaaagcctttttttcttgatcttttcccgagattcaaatctccgattcccatttgggggcaagtttttttcttcaccttcaatatgagaattcagcgaacttgaaagaaaaatcatctgtgagttccttcaggttctcactcatagtcatgatccttcagagggaatatgcactggcgagtttaaagtaagggctatgatatttgatggtcccaaagtacggcagctgcaaaaagtagtggaaggaaattgtctacgtgtcttggaaaaattagttaggaatttggatgggtaaaaggtacccttgccttactccatcttattttcttagccccctttgagtgttttaactggtttcatgtcctagtaggaagtgcattctccatcctcatcctctgccctcccaggaagtcagtgattgtctttttgggcttcccctccaaaggaccttctgcagtggaagtgccacatccagttcttttcttttgttgctgctgtgtttagataattgaagagatctttgtgccacacaggattttttttttttttaagaaaaacctatagatgaaaaattactaatgaaactgtgtgtacgtgtctgtgcgtgcaacataaaaatacagtagcacctaaggagcttgaatcttggttcctgtaaaatttcaaattgatgtggtattaataaaaaaaaaaaaaaaaaactcgctcgtgccgaattcggcacgaggaacaacctgtgtgcatgctttttgagtatattaatcagggggatctccatgagttcctcatcatgagatccccacactctgatgttggctgcagcagtgatgaagatgggactgtgaaatccagcctggaccacggagattttctgcacattgcaattcagattgcagctggcatggaatacctgtctagtcacttctttgtccacaaggaccttgcagctcgcaatattttaatcggagagcaacttcatgtaaagatttcagacttggggctttccagagaaatttactccgctgattactacagggtccagagtaagtccttgctgcccattcgctggatgccccctgaagccatcatgtatggcaaattctcttctgattcagatatctggtcctttggggttgtcttgtgggagattttcagttttggactccagccatattatggattcagtaaccaggaagtgattgagatggtgagaaaacggcagctcttaccatgctctgaagactgcccacccagaatgtacagcctcatgacagagtgctggaatgagattccttctaggagaccaagatttaaagatattcacgtccggcttcggtcctgggagggactctcaagtcacacaagctctactactccttcagggggaaatgccaccacacagacaacctccctcagtgccagcccagtgagtaatctcagtaaccccagatatcctaattacatgttcccgagccagggtattacaccacagggccagattgctggtttcattggcccgccaatacctcagaaccagcgattcattcccatcaatggatacccaatacctcctggatatgcagcgtttccagctgcccactaccagccaacaggtcctcccagagtgattcagcactgcccacctcccaagagtcggtccccaagcagtgccagtgggtcgactagcactggccatgtgactagcttgccctcatcaggatccaatcaggaagcaaatattcctttactaccacacatgtcaattccaaatcatcctggtggaatgggtatcaccgtttttggcaacaaatctcaaaaaccctacaaaattgactcaaagcaagcatctttactaggagacgccaatattcatggacacaccgaatctatgatttctgcagaactgtaaaatgcacaacttttgtaaatgtggtatacaggacaaactagacggccgtagaaaagatttatattcaaatgtttttattaaagtaaggttctcatttagcagacatcgcaacaagtaccttctgtgaagtttcactgtgtcttaccaagcaggacagacactcggccagaaaaaaaaaaaaaaaaaaaaactcgagggggggcccgtacccgatcgc

SEQ ID NO: 7 - protein, 929 aa, Rattus norvegicus
  Diacylglycerol kinase
MEPRDPSPEARSSDSESASASSSGSERDADPEPDKAPRRLTKRRFPGLRLFGHRKAITKSGLQHLAPPPPTPGAPCGESERQIRSTVDWSESAAYGEHIWFETNVSGDFCYVGEQYCVAKMLPKSAPRRKCAACKIVVHTPCIGQLEKINFRCKPSFRESGSRNVREPTFVRHHWVHRRRQDGKCRHCGKGFQQKFTFHSKEIVAISCSWCKQAYHSKVSCFMLQQIEEPCSLGVHAAVVIPPTWILRARRPQNTLKASKKKKRASFKRRSSKKGPEEGRWRPFIIRPTPSPLMKPLLVFVNPKSGGNQGAKIIQSFLWYLNPRQVFDLSQGGPREALEMYRKVHNLRILACGGDGTVGWILSTLDQLRLKPPPPVAILPLGTGNDLARTLNWGGGYTDEPVSKILSHVEEGNVVQLDRWDLRAEPNPEAGPEERDDGATDRLPLDVFNNYFSLGFDAHVTLEFHESREANPEKFNSRFRNKMFYAGTAFSDFLMGSSKDLAKHIRVVCDGMDLTPKIQDLKPQCIVFLNIPRYCAGTMPWGHPGEHHDFEPQRHDDGYLEVIGFTMTSLAALQVGGHGERLTQCREVLLTTAKAIPVQVDGEPCKLAASRIRIALRNQATMVQKAKRRSTAPLHSDQQPVPEQLRIQVSRVSMHDYEALHYDKEQLKEASVPLGTVVVPGDSDLELCRAHIERLQQEPDGAGAKSPMCHPLSSKWCFLDATTASRFYRIDRAQEHLNYVTEIAQDEIYILDPELLGASARPDLPTPTSPLPASPCSPTPGSLQGDAALPQGEELIEAAKRNDFCKLQELHRAGGDLMHRDHQSRTLLHHAVSTGSKEVVRYLLDHAPPEILDAVEENGETCLHQAAALGQRTICHYIVEAGASLMKTDQQGDTPRQRAEKAQDTELAAYLENRQHYQMIQREDQETAV

SEQ ID NO: 8 - DNA, 3560 bp, Rattus norvegicus
  Diacylglycerol kinase
ggagcggaggctgcttccccggcacctgggagtgggtcgcggggacgcgaaggcacagggcgggcggacgcgccttcgccatgagcttggcggcggtgcggaccgggcgtgctgagctccggccgccggcccggcatgggcgtctcccgcgagcccgctgccggccggggctagggccggatggagccgcgggaccccagccccgaggcccggagcagcgactcggagtcggcctccgcctcgtccagcggctccgagcgcgacgcggatccggagccggacaaggctccgcggcgcttaaccaagaggcgcttcccggggctgcggctctttgggcacaggaaagccatcaccaagtcgggcctccagcacctggcaccccctcctcccacgcctggggccccgtgcggtgaatctgagcggcagatccggagtactgtggactggagtgagtcagcagcgtatggggagcacatctggtttgagaccaacgtgtccggagatttctgctatgtcggggagcagtactgtgtagctaagatgctgccgaagtcagcgcccagaagaaagtgtgcagcctgtaagatcgtggtgcataccccttgcatcgggcagctggaaaagatcaatttccgctgtaagccatccttccgtgaatcaggctccaggaatgtccgtgagccaaccttcgtaagacaccactgggtccacaggcgacgccaggatggcaagtgtcggcactgtgggaagggcttccagcagaagttcaccttccacagcaaagagatcgtagctatcagctgttcctggtgcaaacaggcgtaccacagcaaggtgtcctgcttcatgctgcagcagattgaggagccctgttccctaggggtgcatgcagccgtggtcatcccacccacctggatcctacgggcccggaggccccagaacaccctcaaggccagcaagaagaaaaagagagcatccttcaaaaggagatccagtaagaaaggacctgaggaaggccgctggagacccttcatcatcaggcccaccccgtcccccctcatgaagcccctgctagtgtttgtaaaccccaagagtgggggtaaccagggcgctaagatcatccagtcttttctgtggtatctgaacccccggcaagtcttcgatctgagccagggaggacccagggaagcgctggaaatgtaccgcaaagtccataatttgaggattctggcttgcgggggtgatggcacggttggctggattctttccaccctagaccagctgcgcttaaaaccaccacctcctgtggccatcctgcccctgggcactggcaatgacctggcccgaactctcaactggggtgggggttacacagatgagccagtgtcaaagatcctttcccatgtagaggaggggaacgtggtacagctggaccgttgggacctccgagcagagcccaaccctgaggcagggcctgaggagcgagatgacggagccactgaccggctgcccctggatgtcttcaacaactacttcagtctgggctttgatgcccacgtcaccctggagtttcatgagtctcgagaagccaacccagagaagttcaacagccgctttcggaataagatgttctatgctgggacagccttctctgacttcctgatgggcagctccaaggacttagccaagcacatccgagtagtgtgtgacggaatggacctaacccccaagattcaggacctgaaaccgcagtgcatagtctttctgaatatccccaggtactgtgcaggcaccatgccctggggccaccctggggagcaccatgacttcgagccccagaggcacgatgatggctacctcgaggtcatcggcttcaccatgacatccttggccgcattgcaggtgggtggacacggcgagcggctgacccagtgccgagaagtgctgctcaccactgccaaggccatccctgtgcaggtggatggtgaaccctgcaagcttgcagcatcgcggattcgaattgccctgcgcaaccaggccactatggtgcagaaggccaagcgccggagtactgccccactgcacagcgatcagcagccagttcctgagcagctgaggatccaagtgagcagggtcagcatgcacgactacgaggctctccattatgacaaggagcagctcaaggaggcctctgtgcctctgggtactgtggtggtccccggagacagtgacctagagctctgccgagcccacattgagagactccagcaggagcccgatggggctggagccaagtcccccatgtgccacccactgtcctccaagtggtgtttcctggacgccaccactgccagccgcttctacaggatcgacagggcccaggagcacctcaactatgtgacggagattgcccaggatgagatttatatcctagacccagagctgctgggtgcatcagcccgacctgacctccctacccctacctccccgctccctgcctccccctgctcccctacacccgggtcactgcagggggatgccgcactgccccaaggtgaagagctgattgaagctgccaagaggaatgacttctgcaagctccaggaactacaccgagcaggaggtgacctcatgcaccgcgaccatcagagccgcacactcctgcaccacgcagtcagcactggcagtaaggaagtggtccgctatctgctcgatcatgcaccaccagagatcctcgatgctgtggaggagaacggggagacctgtctacaccaggcagccgccctaggtcagcgcaccatctgccactacattgtggaagccggggcctccctcatgaagacagatcagcagggcgacactcccaggcagcgagctgagaaggctcaagacacagagctagctgcatacctggagaacagacaacattaccagatgatccaacgtgaggaccaggagacagctgtgtagttaaggggaccatggatcaacgagggacactaccagaggactagagctctccttgcccatctcactgccacattcctgtcagatggctatggggggaccctgtcacagggaaggagccccgtgccaccccctgagaagccgttcagatctagggctggactctaaggagctggactctcacctgtccctggtttcatggggaacaggaaacaagctgggctgactgggtccctcccttcaggcggcctccccctcaccacagctgatggaatggctggacagctcagtcagggaggcctgctctcagcaggactttctaaagccacctgatcccttgggctctttggaaggttctgggtgcctagccctcctctctgacccacacaccttgggcatcccagaaactcaagagcctgctgtatttgcctgcccgctgccctgcttggcacctaccctggtgatcctcctcatgcacccagtcatttcatttccgactgtatggcctggggtggggggtggggctcccacggtgacttgtttacagctgggtgtgactcagtaaagtgaagtttttttccttaaaaaaagcg

SEQ ID NO: 9 - protein, 380 aa, Rattus norvegicus
  Elk protein tyrosine kinase
EAVREFAKEIDVSFVKIEEVIGAGEFGEVYKGRLKLPGKREIYVAIKTLKAGYSEKQRRDFLSEASIMGQFDHPNIIRLEGVVTKSRPVMIITEFMENGALDSFLRQNDGQFTVIQLVGMLRGIAAGMKYLSEMNYVHRDLAARNILVNSNLVCKVSDFGLSRYLQDDTSDPTYTSSLGGKIPVRWTAPEAIAYRKFTSASDVWSYGIVMWEVMSFGERPYWDMSNQDVINAIEQDYRLPPPMDCPAALHQLMLDCWQKDRNSRPRFAEIVNTLDKMIRNPASLKTVATITAVPSQPLLDRSIPDFTAFTTVDDWLSAIKMVQYRDSFLTAGFTSLQLVTQMTSEDLLRIGVTLAGHQKKILSSIHSMRVQMNQSPSVMA

SEQ ID NO: 10 - DNA, 1509 bp, Rattus norvegicus
  Elk protein tyrosine kinase
gaagctgtccgggagtttgccaaggagattgatgtgtcttttgtgaaaattgaagaggtcatcggagcaggggagtttggagaagtgtacaagggccgattgaagctgccaggcaagagggaaatctatgtggccatcaagaccctgaaagctgggtactcagagaaacagcgtcgggattttctgagcgaggcgagcatcatgggccagtttgaccatcccaacatcattcgcctagagggtgttgtcaccaagagccgacctgtcatgatcattacggagttcatggagaatggcgctttagactctttcctccggcaaaatgacggacagttcaccgtgatccagcttgtggggatgctgaggggcatcgctgctggcatgaagtacctatctgagatgaattatgtgcaccgggacctggctgctaggaacattctggtgaacagcaacctggtgtgcaaagtgtctgactttggcctctctcgctacctccaggatgacacctcagaccccacctacaccagctccttgggggggaagatacctgttagatggacagctccagaggccatcgcctaccgcaagtttacgtcagccagcgatgtctggagctacgggattgtcatgtgggaagtaatgtcatttggagagagaccttactgggatatgtccaatcaagatgtcatcaatgccattgagcaggactaccggctgccccctcctatggactgcccagctgccctgcaccagctcatgctggactgttggcagaaggatcgaaatagccggccccgttttgcagagatcgtcaacaccctggacaagatgatccggaacccagctagtctcaagactgtggcaaccatcaccgctgtgccttcccaacccctgcttgaccgctctatcccagacttcacggcctttaccaccgtggatgactggctaagtgccatcaaaatggtccagtacagggacagcttcctcaccgctggcttcacctccctccagctggtcacccagatgacatcagaagacctcctgagaataggggtcaccttggcaggccatcagaagaagattcttagcagcatccactcgatgagggtccagatgaaccagtcaccgtcggtaatggcatgagaactcgatgttcctaggggaggagaggaatgaaaaggaccagggtcaaaggggaaacagaggttgaccacggtggaatgtgccagaaagatcagcttcttggctgagaaacaacttcccacctgtgaagaatgaactggacctgctgcccatgggcaaccgccatttctcggccatggaagtgtgtagaagccgtgggaaaccaaacgcgtaatgattgacgataaagacagagaaaggtgatgctaaacagaagcgaagctgaaaccgtatgcgttgggaaccagggtgaactcagttcccatctgagagggactggagttccccgtctgcaggaagaaaggaaggaggtggagggaagagagg

SEQ ID NO: 11 - protein, 330 aa, Rattus norvegicus
  PP-1 alpha
MSDSEKLNLDSIIGRLLEVQGSRPGKNVQLTENEIRGLCLKSREIFLSQPILLELEAPLKICGDIHGQYYDLLRLFEYGGFPPESNYLFLGDYVDRGKQSLETICLLLAYKIKYPENFFLLRGNHECASINRIYGFYDECKRRYNIKLWKTFTDCFNCLPIAAIVDEKIFCCHGGLSPDLQSMEQIRRIMRPTDVPDQGLLCDLLWSDPDKDVQGWGENDRGVSFTFGAEVVAKFLHKHDLDLICRAHQVVEDGYEFFAKRQLVTLFSAPNYCGEFDNAGAMMSVDETLMCSFQILKPADKNKGKYGQFSGLNPGGRPITPPRNSAKAKK

SEQ ID NO: 12 - DNA, 1392 bp, Rattus norvegicus
  PP-1 alpha
aggaggctgcaagagggcgggaggcaggagagggcccggagctggtgggccggagcggcggcgccgccatgtccgacagcgagaagctcaacctggattccatcatcgggcgcctgctggaagtgcagggctcacggcctggaaagaatgtgcagctgacagagaacgagatccgtggtctttgcctcaaatcccgggagattttcctgagccagcctattcttctggagcttgaggcgcctctcaagatctgtggtgacatccatggccagtactatgaccttctacggctgttcgagtatggtggcttccctccagagagcaactacctcttcttgggggactatgtggatcggggaaagcagtctttggagaccatctgcttgttgctggcctataagatcaaatacccggagaatttctttctactacgtgggaaccatgagtgtgccagcatcaaccgcatctatggcttctatgatgaatgcaagagacgatacaacatcaaactgtggaagactttcaccgactgcttcaactgcctgcccattgcagccattgtagatgagaagatcttctgctgccacggaggcctgtctccagacttgcaatccatggagcagattagacgtattatgcggcccacggacgtgcctgaccagggcctgttgtgtgatctgctgtggtctgaccctgacaaggatgttcaaggctggggcgagaatgaccgtggagtctcctttacctttggggccgaggttgtagccaagttcctgcacaagcatgatttggacctcatctgcagagcacatcaggttgtagaagatggctatgagttctttgccaagaggcagctggtgacactcttctcagctcccaactactgtggcgagtttgacaacgctggcgccatgatgagtgtggacgagacactcatgtgttccttccagatcctcaagcccgctgataagaataaggggaagtatgggcagttcagtggcctgaaccccggaggccgtcccatcactccaccccgcaattctgccaaagccaagaaatagcctccatgtgctgccctctgccccagatgacggattatttgtacagaaatcatgctgccatgggtcacactggcctctcaggcccacccatcatggggaacacagcgttaagtgtctttcctttattttttaaagaatcaatagcagcatctaattccccagggctccctcccaccagcacctgtggtggctgcaagtggaatcctggggccaaggctgcagctcagggcaatggcagaccagattgtgggtctccagccttgcatggctggcagccagatcctggggcaacccatctggtctcttgaataaaggtcaaagctggattctc

SEQ ID NO: 13 - protein, 369 aa, Rattus norvegicus
  Striatum enriched protein-tyrosine-phosphatase
MEEKVEDDFLDLDAVPETPVFDCVMDIKPEADPTSLTVKSMGLQERRGSNVSLTLDMCTPGCNEEGFGYLVSPREESAHEYLLSASRVLRAEELHEKALDPFLLQAEFFEIPMNFVDPKEYDIPGLVRKNRYKTILPNPHSRVRLTSPDPEDPLSSYINANYIRGYNGEEKVYIATQGPIVSTVVDFWRMVWQERTPIIVMITNIEEMNEKCTEYWPEEQVVHDGVEITVQKVIHTEDYRLRLISLRRGTEERGLKHYWFTSWPDQKTPDRAPPLLHLVREVEEAAQQEGPHCSPIIVHCSAGIGRTGCFIATSICCQQLRREGVVDILKTTCQLRQDRGGMIQTCEQYQFVHHAMSLYEKQLSLQSSE

SEQ ID NO: 14 - DNA, 2815 bp, Rattus norvegicus
  Striatum enriched protein-tyrosine-phosphatase
ggggggatgttgagggatgagggcctttctggtggcctccgttacttcaagtcttcatgactggaacgaagggaagactggagttctgaactacagtctcaggaattaatttcctcgtatcctgcctaccctaacccataaataaaaagacaggtatcctgggtctctctgaagacctcctgtctaaggaggcctttctggaagacttcctttctatgtgtacctgtggggtcttttgtggggagggatgtctcagtcgcctgtgattagcttttctcctgaagactgctgaggcctcctctgggtacaccacctctccctccactgcccagtctgagaggctcaggagcttcctgggggctgaaggtgagctctgcagggcaatataggggcaaaggggtgcagctgtccactcagtctgcgcccccgactgccccagcttgcctgtggggtgctctggctcagtggccatggccactcctggctgcagaccaccacagacctcatcttctcctcgctcaccgtgttgaaccacctgggacctgcagcctggctaggttctgggacctgggggacaccaagtctgctgttagtctctctgactgtgagcctgggcatcatcaccaccctggtgtggcaccttctcaagacacccccagagccacctgtcccactgcccccagaggacagacgacaatcagtgagccggcagccctccttcacttactcagagtggatggaggagaaggtagaggatgactttctggacctggacgcagtgccggagacacccgtgtttgactgtgtgatggacatcaagcctgaggctgatcccacctcgttgactgtcaagtccatgggtctgcaggagaggaggggctccaatgtctccttgaccctggacatgtgtactcctggctgcaatgaggagggctttggctacctggtgtccccacgagaggagtcagcccatgaatacctgctcagtgcctcccgtgtcctccgggcagaggagctgcacgaaaaggccctggaccctttcttgctgcaggcggaattctttgaaatccccatgaactttgtggatccaaaagaatatgacatcccagggctggtacggaagaatcggtacaaaaccatccttcccaatcctcacagcagggtacgtctgacgtcaccagaccctgaagatcctctgagttcctacatcaatgccaactatatccggggctacaatggggaggagaaggtgtacatcgccacccagggacccatcgtcagcactgtggtcgacttctggcgcatggtgtggcaggagcgcacacccatcatcgtcatgatcaccaacatcgaggagatgaacgagaagtgcacggaatattggccagaagagcaggtcgtccacgatggcgtagagatcactgtgcagaaagtcatccacacagaggactaccggctgcgacttatctccctcaggagagggactgaagagagaggcttgaagcattactggttcacatcctggcctgaccagaagacccccgaccgggcacccccactcctgcacctggtacgggaggtggaggaggcagcccagcaagagggaccccactgttccccgatcattgttcactgcagtgcagggattgggagaaccgggtgcttcatcgccaccagcatctgctgccagcagctgcgacgtgagggcgtggtagacatcctaaagaccacgtgccagctccgtcaggacaggggcggcatgatccaaacatgcgaacagtatcagtttgtgcaccacgccatgagcctctatgagaagcagctatccctccagtcctcagagtgaccacactcttcctctgagatccactgggcactgccgagtctgaggctggggcttcaccccaactacccaaggtcttaccttgggtcctgggcctgttccctggctctccccttcagtctgcccccatctgttgtcctggcctggtccctaccccaagcctagctcttctactgtacatactgcagagttcgggagggcaggggaggaatgtgccaggccaggcctggggccctgggcctgacccacactatatagacctggggcctcagttttaaccatgattccacagctacttgatccaaaatgttttcatgccacaccccaagtgtcctaccacaacatgttctgtctgtccatccatcacagctatctgtaccaaacactgtgtcccctcagccaggaaaggagtactgatctgagctctcacccctcagccctcacccacatcgccattcccagacacccaccctgatccccaggcagagatgtctaccaatctctggcctcacaggatgtggatggtggagaccaggcagaggagaatgtggtggttgaccgagatcccagctgagaaggttcccaggcaagggtgggcatctctggcctatgagacactggagagaaagaggacagatatagtgggaaaccctaaggatctgagccctgagggggccctccaagagtagggtggggacagctccagacctgcaaggcatctttctgtgtcactatgggaaaccccaaatgtctcctcgctacatgttgctccgtgtgttcccttgtccatgtttgtgttgagagcccatgagcagggcatgcatgactctttggcaacatgtgttatcttggagccacgtgtttttatcgctgactttaaatatttattccacggcatacagagacatttggtgtctttttataatctgctcgtggtcattgaatagagcaataaacagagcattttgagca

SEQ ID NO: 15 - protein, 1013 aa, Rattus norvegicus
  Na+,K+ - ATPase alpha subunit
MGDKKDDKSSPKKSKAKERRDLDDLKKEVAMTEHKMSVEEVCRKYNTDCVQGLTHSKAQEILARDGPNALTPPPTTPEWVKFCRQLFGGFSILLWIGAILCFLAYGIQAGTEDDPSGDNLYLGIVLAAVVIITGCFSYYQEAKSSKIMESFKNMVPQQALVIREGEKMQVNAEEVVVGDLVEIKGGDRVPADLRIISAHGCKVDNSSLTGESEPQTRSPDCTHDNPLETRNITFFSTNCVEGTARGVVVATGDRTVMGRIATLASGLEVGKTPIAIEIEHFIQLITGVAVFLGVSFFILSLILGYTWLEAVIFLIGIIVANVPEGLLATVTVCLTLTAKRMARKNCLVKNLEAVETLGSTSTICSDKTGTLTQNRMTVAHMWFDNQIHEADTTEDQSGTSFDKSSHTWVALSHIAGLCNRAVFKGGQDNIPVLKRDVAGDASESALLKCIELSSGSVKLMRERNKKVAEIPFNSTNKYQLSIHETEDPNDNRYLLVMKGAPERILDRCATILLQGKEQPLDEEMKEAFQNAYLELGGLGERVLGFCHYYLPEEQFPKGFAFDCDDVNFTTDNLCFVGLMSMIDPPRAAVPDAVGKCRSAGIKVIMVTGDHPITAKAIAKGVGIISEGNETVEDIAARLNIPVSQVNPRDAKACVIHGTDLKDFTSEQIDEILQNHTEIVFARTSPQQKLIIVEGCQRQGAIVAVTGDGVNDSPALKKADIGVAMGIAGSDVSKQAADMILLDDNFASIVTGVEEGRLIFDNLKKSIAYTLTSNIPEITPFLLFIMANIPLPLGTITILCIDLGTDMVPAISLAYEAAESDIMKRQPRNPRTDKLVNERLISMAYGQIGMIQALGGFFSYFVILAENGFLPGNLVGIRLNWDDRTVNDLEDSYGQQWTYEQRKVVEFTCHTAFFVSIVVVQWADLIICKTRRNSVFQQGMKNKILIFGLFEETALAAFLSYCPGMDVALRMYPLKPSWWFCAFPYSFLIFVYDEIRKLILRRNPGGWVEKETYY

SEQ ID NO: 16 - DNA, 3557 bp, Rattus norvegicus
  Na+,K+ - ATPase alpha subunit
tctgtgccgtgggacccacgaccgacagacgcacgctcccaacgcggcgggcgtgcagaggcccccagcccgagcccgcgctgagcccgtcctgcgccacgctcacagcctgtccgccgtcttcccgcggagccgccaagatgggggacaaaaaagatgacaagagctcgcccaagaagagcaaggccaaagagcgccgggacctggatgacctcaagaaggaagtggctatgacagagcacaagatgtcagtagaagaggtctgccggaaatacaataccgactgcgtgcagggtctgacacacagtaaagcccaggagatcctagcccgggatgggcctaacgccctcacaccaccgcccaccaccccagaatgggtcaagttctgccgacagctatttggtggcttctccatcctgctgtggatcggggcgatcctttgcttcctggcctatggcatccaggcagggactgaggatgacccttccggtgacaatctgtacctgggcatagtgctggccgctgtggtgatcatcaccggctgcttctcctactaccaagaagccaagagctctaagattatggagtccttcaagaacatggttccccagcaagcccttgtgatccgggaaggtgaaaagatgcaggtgaatgcggaggaggtggtggtcggggacctggtggagatcaagggtggcgaccgggtgcccgctgacctgcgcatcatctcggcccatggctgcaaggtggacaactcttccctgactggcgaatctgagcctcagacccgctccccggactgcacacacgacaacccactggagacccggaacatcaccttcttttccaccaactgtgtggaaggcaccgctcgtggtgtggtggtagccacaggtgaccgcaccgtcatgggccgcattgccaccctggcctcaggcctggaggtgggcaagacgcccatcgccattgagatcgagcacttcatccagctcatcactggcgtggccgtgttcctgggcgtctccttcttcatcctctccctcattctgggctacacctggctggaggctgtcatcttcctcatcggtatcattgtggccaatgtcccagagggcctgctggctactgtcacggtgtgtctgacgctgaccgccaagcgcatggctcggaagaactgtctggtaaagaacctggaggcggtggagacgctaggctccacatccaccatctgctccgacaagaccggcaccctcacccagaaccgcatgaccgtcgcccacatgtggtttgacaaccagatccacgaggccgacactactgaggatcagtcagggacctctttcgacaagagctcacacacctgggtggccctgtcccacatcgccggtctctgcaaccgggctgtcttcaagggcgggcaggataacatccctgtactcaagagggacgtggcgggtgatgcctcagagtccgccctgcttaagtgcatcgagctgtcctcgggttccgtaaagctgatgcgcgaacgaaacaagaaagtggccgagattcccttcaactccactaacaaataccagctatccatccatgagactgaggaccccaatgacaaccgatacctgttagtgatgaagggcgcccctgaacgcattctggaccgctgtgcgaccatcctcctgcagggcaaggagcagcctctggatgaggagatgaaggaggccttccagaacgcctacctggagcttggtggcctgggcgagcgtgtgctgggtttctgccattactacctgccggaggaacagttccccaagggctttgcctttgactgtgatgacgtgaacttcaccacagacaacctttgcttcgtgggtctcatgtccatgatcgaccctccccgggcagctgtccctgatgctgtgggcaaatgccgcagtgcaggcatcaaggtcatcatggtcaccggcgatcaccccatcactgcgaaggccatcgccaaaggtgtaggcatcatctccgagggtaacgagactgtggaggacatcgctgcccggctcaacatccctgtcagccaggtcaaccccagggatgccaaagcctgtgtgattcatggcaccgacctcaaggacttcacctctgagcagattgacgagatcctacagaaccacactgagatcgtctttgcccgaacctcccctcagcagaagctcatcatcgtggagggctgtcagagacagggagcaattgtggctgtgactggcgatggtgtgaatgactcccctgctctgaagaaggctgatattggggtggccatgggcattgctggctctgatgtctctaagcaggctgccgacatgattctgctggatgacaattttgcttccattgtcactggtgtggaggaaggccgcctgatctttgacaacctgaagaaatccatcgcctacactctgaccagcaacatccctgagatcacacccttccttctcttcatcatggccaacatcccactgccccttggcaccatcaccatcctctgcattgacctgggcaccgacatggtccctgcaatctccttggcctacgaggctgcagagagtgacatcatgaagaggcagcccaggaacccacgcacagacaaactggtcaacgaaaggctcatcagcatggcctatgggcagatcgggatgatccaggccctcggtggtttcttctcctactttgtcatcctggcagaaaatggtttcttgcccggtaacctggtgggcatccggctcaactgggatgaccgcactgtcaacgacctggaagacagctacgggcagcagtggacttatgagcagaggaaggtggttgagttcacgtgccacacagccttcttcgtgagcatagtggtggtccagtgggctgacctgatcatttgcaagaccaggaggaattccgtcttccagcagggcatgaagaataagatcttgatcttcggactgtttgaggaaacggccctcgctgccttcctgtcctactgcccaggcatggatgtggcccttcgcatgtacccgctcaagcccagctggtggttctgtgccttcccctacagtttcctcatcttcgtctatgatgagattcgcaaactcatcctgcgcaggaaccccgggggttgggtggagaaagagacctactattgacctcagccaccacgtcgcccatgtcttccctgccccccagcccaggacagccctctccggtcccccattttgtactctggggggaggggccttctctccccgatggcccccctctctccttgtggcccagtctcctctcccacacctcggttacctctcactttccctcatttctccctctggctggcttctctccccccacagcccctgcctctcttctccttcccttttctgtgtctctccccctctctcccttgcagccctgcccctcattttctccctgggctcctttttacacccctgggccctgtctcctggctaatgccatctccggttctaaatctgaacaattatcaaatatatcagtggggagag

SEQ ID NO: 17 - protein, 295 aa, Rattus norvegicus
  Voltage-dependent anion channel 2
MAECCVPVCQRPICIPPPYADLGKAARDIFNKGFGFGLVKLDVKTKSCSGVEFSTSGSSNTDTGKVSGTLETKYKWCEYGLTFTEKWNTDNTLGTEIAIEDQICQGLKLTFDTTFSPNTGKKSGKIKSAYKRECINLGCDVDFDFAGPAIHGSAVFGYEGWLAGYQMTFDSAKSKLTRSNFAVGYRTGDFQLHTNVNNGTEFGGSIYQKVCEDFDTSVNLAWTSGTNCTRFGIAAKYQLDPTASISAKVNNSSLIGVGYTQTLRPGVKLTLSALVDGKSFNAGGHKLGLALELEA

SEQ ID NO: 18 - DNA, 870 bp, Rattus norvegicus
  Voltage-dependent anion channel 2
cttcgccatggctgaatgttgtgtaccggtatgccaacggccaatttgtatccctccaccctatgctgaccttggcaaagctgccagagatattttcaacaaaggatttggttttgggttggtaaagctggatgtgaaaacgaagtcatgcagtggtgtggaattttcaacatctggctcatctaatacagacactggtaaagtcagtgggaccttggagaccaagtacaaatggtgtgagtatggtctgactttcacagagaaatggaacactgacaacactctggggacggagattgcaattgaagaccagatttgtcaaggtttgaaactgacctttgacaccacgttttcaccaaacacaggaaagaaaagtggtaaaatcaagtctgcttacaagagggaatgtataaaccttggctgtgatgttgattttgattttgctggacctgccatccatgggtcagccgtctttggttacgagggctggcttgctgggtaccagatgacctttgacagtgccaagtcaaagctgacaaggagtaacttcgcagttggctacaggactggggacttccagctacacacaaatgtaaataatgggacagaatttggaggatcaatttatcagaaagtatgtgaagattttgacacttcagtaaaccttgcttggacatcaggtaccaactgcactcgttttggcattgcagctaaataccagttggaccccactgcttctatttctgcaaaggtcaacaactctagtttaattggagtgggctatactcagactctgaggcctggtgtgaagcttacactgtctgctctggtagacgggaagagctttaatgctggaggccacaaacttgg

SEQ ID NO: 19 - protein, 390 aa, Rattus norvegicus
  Neonatal glycine receptor
MNRQLVNILTALFAFFLGTNHFREAFCKDHDSRSGKHPSQTLSPSDFLDKLMGRTSGYDARIRPNFKGPPVNVTCNIFINSFGSVTETTMDYRVNIFLRQQWNDSRLAYSEYPDDSLDLDPSMLDSIWKPDLFFANEKGANFHDVTTDNKLLRISKNGKVLYSIRLTLTLSCPMDLKNFPMDVQTCTMQLESFGYTMNDLIFEWLSDGPVQVAEGLTLPQFILKEEKELGYCTKHYNTGKFTCIEVKFHLERQMGYYLIQMYIPSLLIVILSWVSFWINMDAAPARVALGITTVLTMTTQSSGSRASLPKVSYVKAIDIWMAVCLLFVFAALLEYAAVNFVSRQHKEFLRLRRRQKRQNKEEDVTRESRFNFSGYGMGHCLQVKDGTAVK

SEQ ID NO: 20 - DNA, 3865 bp, Rattus norvegicus
  Neonatal glycine receptor
ttttttttcacaccaagcagagtttattgatgccgtgggcggggcccacgtacacagcaggtggcgcacgcagggcagatactcactggctggactgcaggggtgttagcagcggcaaaagcagatgacctgtggggagcaccctttggggggtgccctcctcctagcagcattgggggctttgggtgagcatcaagaaccacctagtcaccctaaggttctcttggaagcccctccccctccttcccgagctccttgtgagttgggggctaggatcccttcctgtgatcaaaggtgggatgatcccttgagattcactataaaaattaaaattcatttataaatcacaagagaagggcaggagggaacaccggggaaacctgacttcatcggttaccttgagcctactcccctccctcaggttctaactccaaaagagagagcaaagagctaggtctacaggcacagaaaggggcgagagacagaggaaaggcagtcggaagaacgggacgagagaggaaaaagatgcatcggaagaaaagtatggctgctgaggctcctctccccaacagctcccgaaagccatgacctggggataaaggagaaaagttcccagcccagagactcctacaaggtaaggttccaaatgtccccgatccggtccttgctcaagccatggcgggccttgagatactcagagctgtgtggatgggagctgagggaggcgagtgctactccaggtagatatcttctgtggggcaggcgaatgccaggtgctcctggtagtactccaggaaggcccggcccacgctccttgccactggcctcatagactcctgggacacaaagacgtggcaggcaaagcggcttagcagcgggtgtttggtaatgaagccaaaatagcagctgtttcggggatgacagccacagaaggagatgttcttcatctggaaaaagtggctgcaacgccctggtttgacctgaccatgatgcccaagactggcactttttgttttttctcagcaaactgtacaaccccaaatctctttttgattttcaaggaaactagattcctgccagaatttgagtctggacaataaatagacactttgtcctagtcttctttctggaatcatttcgggatattttccacaagcatcacggaaacaggaatgaaccggcagctagtgaacattttgacagccttgtttgcatttttcttagggacaaaccacttcagggaagcattctgcaaagaccatgactccaggtctggaaaacatccctcgcagaccctgtctccttcagatttcttggataaactaatgggaaggacatcaggatatgatgcaagaatcaggccaaattttaaaggtcctccagtaaacgttacttgcaatatttttatcaacagttttggatcggtcacagaaaccaccatggactaccgagtgaacatttttctgagacagcagtggaacgattcacggctggcatacagtgagtacccagatgattccctggatttggatccatcgatgctggattcgatttggaaaccagatttgttctttgccaatgagaaaggagccaatttccatgatgtcaccactgataacaagttgctgcggatttccaaaaatggcaaagtgctctacagtattagactcaccttgactttatcctgtcccatggacctgaagaactttccaatggatgtccagacctgtacaatgcagctggagagttttgggtacaccatgaatgacctgatatttgagtggttaagtgatggtccagtacaagttgctgaaggactcaccctgcctcagtttattttgaaagaagagaaggaacttggctattgcacaaagcattacaacactggcaagtttacctgcattgaggtcaagtttcacctggaacgccagatgggctattatttgatccagatgtatatccccagcctgctgatagtcattttgtcctgggtctccttttggataaacatggatgcagctcctgccagggttgcccttggcatcacaaccgtcctgacaatgactacccagagttcaggttccagggcatctctgccaaaggtctcatatgtgaaagcaattgacatctggatggcagtgtgccttctgtttgtgtttgctgccttactggaatatgcagcagtgaactttgtctccaggcaacacaaggagttccttcgtctccggagacgacagaagaggcagaataaggaagaagatgttactcgtgaaagccgttttaacttcagcggttatgggatgggtcactgcctccaagtgaaagatggtacagctgtcaaggctacacctgccaacccacttccgcaacccccaaaagatgcagatgctatcaagaagaagtttgtggatcgggcaaaaagaatcgacaccatatctcgagctgccttcccactggccttcctcattttcaacatcttttactggatcacatacaagatcattcggcatgaagatgtccacaagaaatagatgtatcctattgaccctgggaccttctttgcctaagtgttgtgcttgtaaatacacagtaatagtgtctttatattgctttgacagagaacattgagggtggggggaggaaaatcatgagggtggggtttctggcacctacatgacaaaggacaggttctatgggcaaggaagaaaactgcacaaaattaaggtgttgcagaatcacatgagcataactcccatccatagtctatagcattgttctttcagaggacacatcactcagacatgatatgcaaggtcaagttcttgagggctggttatcttatggtttgatttgacaagttctggttctgaaaggttagtttaatgcacacacacacacacacacacacacacacacacacacacacacacacagaaaatgcttaccatctgacaatagtgactaccatatagtaaattgaggaccaaactttttcaggaaaatgctgcctcatttttaaaacaagcctcctgagctatgatatttacaatgtctgtaattagtgtttcacccaagaaatccttttgtgggttgtaaattctttctacaaatccaggaaacaacaacaagataaacacaaatgactaagagcagatttctactctgctgtctgtgtaggtgtgcactttgatattatttttctttcctagatataatgtgggggcttccttgtgtattgcgtaattgatttactggtatatcctcttaaaagaaatgctcattttattttagatcaagttagcatattatgtatattttttcactttggctatacttatgtgtgactttaagtgcccaagtgtaatttagctattgcagctgctatgccacagtatttatggagacggtgtgttgtgattggtgtatctcagagtagctcaaacttcccatttctgccctcattgtagctgtaactactagtcctaatgttgactgacctgtaatttgtactttcaatccaagtgaatatcgttttaaatatccttgattaactgaaaaaaattcaaactgtactgtgattttcataacccgttgccttttcggtatcagagctacgtggtttgaatcctggctacatgttttaagtaagaaaaaaaatatgtatttttgcttactcaaaagacaacctgtaaagttatatggaaataattacattttacatgtgctgtaaaagggattattttaaaaaagcatttgttcagtttcaataaaggtaagtgtgccaccaaaaaataattcccatgttgctggtggtggtagttgttgaatagctgttggcattggtgaaaaaggagctggaactggc

SEQ ID NO: 21 - protein, 267 aa, Rattus norvegicus
  Syntaxin 13
MYRNPGPSGLRPRDFNSIIQTCSGNIQRISQATAQIKNLMSQLGTKQDSSKLQENLQQFQHSTNQLAKETNELLKELGSLPLPLSASEQRQQKLQKERLMNDFSSALNNFQVVQRKVSEKEKESIARARAGSRLSAEDRQREEQLVSFDSHEEWNQMQSQEEEAAITEQDLELIKERETAIQQLEADILDVNQIFKDLAMMIHDQGDLIDSIEANVESSEVHVERASDQLQRAAYYQKKSRKKMCILVLVLSVIVTVLVVVIWVASK

SEQ ID NO: 22 - DNA, 2963 bp, Rattus norvegicus
  Syntaxin 13
ctggagctttgagccacctctcaaaggaataatcggtagcagcattcagactgtcacgtggttcccaaaaggagggcttaggtccaaaacacccacccccattggatactctttgggtcccaaaattccattgcaaatcatccctaagttacaaccatccatccatacaaagcagcacagagcaaagcaaagggtttgtgcggttcccctccattatatctgccttatagcccaccctccaaaaacgtttagatagattccaggccgggaaaccacctcttcaggaccccgagggtaggatcagaaacgagacacagtttcaagaaactctgctcagacggaagggacaggagaggcctttccgtgtgcccaggatctcagcagaaaaacaaaagagaagattaggcaatgtagtattatttgagaccaggcttgaatgcccctgagtaagagagggaccaggaatacaggcatcccagcgggacggtaacccagagcagaccctgacccctctcgttcacagttgctaaccttgctcccttccaccacctcctgggggatcagccaagaatccccttttaccttggctaggccaatccccaacccactcccctaggcaaacactggctcatagactcaatcaagaacagttctctcagctactgggcccggtcagtggcagcttccggtagacgccgtgaagcgcgaccccggtctctgctccgtgtcatgtctacggtcccttagacatgtatcggaatcccgggccgtcggggctcaggccccgtgacttcaacagcatcatccagacatgcagtggcaacatccagcggatcagccaagccactgctcagataaagaatttgatgagccaacttggaactaagcaggactcaagcaaactccaggaaaatttgcaacagttccagcactccacaaatcagcttgccaaggagacaaatgagttgctgaaggagttagggtccttgcccctacccttgtctgcatcagagcagcgccaacagaagcttcagaaggagcggctcatgaatgacttctcgtcggccttgaacaatttccaggttgtgcagagaaaggtatctgagaaggagaaagaaagcatcgcgagagcgagggctggatcccgtctttctgcagaagacaggcaaagagaagagcagctcgtctcatttgacagccatgaggagtggaaccagatgcagagccaggaggaagaggcggccatcactgagcaagacctggaacttattaaagagagggaaacggcgattcagcagctggaggctgacattttggatgtcaatcagatctttaaagacttagctatgatgatccacgaccaaggtgatctgattgatagcatagaagccaatgtggaaagctcagaggtgcatgtggaaagagcctctgatcagctacagagagctgcttactatcagaaaaaatctcgcaagaagatgtgtatcctcgtgcttgtcctctcagtgattgttacagtcttggtagttgttatctgggttgcttctaagtgaagtgtggttgcctcagagccttctcctgctgagttgttttcgagggcaagtgtttgatggagtcttgccagaacaaactgaccacagaagagagtgtgtaccacagtgtcctgtgataatttagctagaaactaactactaactagtccttggaattagtgaccatggaggcagtatttatcaactacaactagtccttggaattagtgaccatggaggcagtatttatcaatttatgcatatatgctcttcatttctcaaagaacgaattaacttatgtgtattttcctttctcttgtattttgattgccctttattgcaagtgtttattgacagtcccactgtggatattctttgtgacaggtgacactacatcatagtactgtctttttgtatatacacaaactatacctttttatgcatatctgagataaatttccttctggagccagcctatcagagtctgagaagctgtacaatatgccagcaatttttattatttaacgttttgctttgagtttctgaggggtctgttctctgttttgcaaggttttggcactataaataactggggagtaagaacactgcacccatgacttcagaggaaatgagaaaaacttgtcagagtgggcccgctgccagggtttgtgggaaagtctgggtttgggttaactgaccttattgtctgcgggtgttgtttacgcagtccatcctcgcacactaagccatcccgctcctggtttagagaggatcagttcattaccattgttctaatcaatcaggtctctctcccacctgtctgcatagaagggggattcgctcagcccagcatgactttggagagcagatgaggactgtttggaatgattgagtccctctcgtcctcgtgtggctttcattctgatgaatgataaacgctgctgtcaaaggctgatccaggcccttggaagggttgcctggctttgatggcaagattttgaaatttagactgaagtgcggtttaaaactcggtctgtgaacctattgataaagcaaagcaaaggttcactttgtaaataacactggtttagtgatgacagaattagcctaatttatgaacaagagacaaactctgtgtagttttagataaaaacagttttaataaaaggtttctgtcttgtatataaatgttgtctactgccctttttcacagacctagaacagtcagagagcgtgtaattggtttgggctctcagataaatgtggattgaggccggaaatgtcagcagcacatccttggctgacgtagaggatctggctgctgtggcaatatctgtgtttgttccttctatccctcatgctgtcacttactgctgtcccacactaatgtgaccatggagaagcaagcaaatgcataggtttcctcgagcc

SEQ ID NO: 23 - protein, 1176 aa, Rattus norvegicus
  ATPase, calcium, plasma membrane, isoform 1
MGDMANNSVAYSGVKNSLKEANHDGDFGITLAELRALMELRSTDALRKIQESYGDVYGICTKLKTSPNEGLSGNPADLERREAVFGKNFIPPKKPKTFLQLVWEALQDVTLIILEIAAIVSLGLSFYQPPEGDNALCGEVSVGEEEGEGETGWIEGAAILLSVVCVVLVTAFNDWSKEKQFRGLQSRIEQEQKFTVIRGGQVIQIPVADITVGDIAQVKYGDLLPADGILIQGNDLKIDESSLTGESDHVKKSLDKDPLLLSGTHVMEGSGRMVVTAVGVNSQTGIIFTLLGAGGEEEEKKDEKKKEKKNKKQDGAIENRNKAKAQDGAAMEMQPLKSEEGGDGDEKDKKKANLPKKEKSVLQGKLTKLAVQIGKAGLLMSAITVIILVLYFVIDTFWVQKRPWLAECTPIYIQYFVKFFIIGVTVLVVAVPEGLPLAVTISLAYSVKKMMKDNNLVRHLDACETMGNATAICSDKTGTLTMNRMTVVQAYINEKHYKKVPEPEAIPPNILSYLVTGISVNCAYTSKILPPEKEGGLPRHVGNKTECALLGFLLDLKRDYQDVRNEIPEEALYKVYTFNSVRKSMSTVLKNSDGSFRIFSKGASEIILKKCFKILSANGEAKVFRPRDRDDIVKTVIEPMASEGLRTICLAFRDFPAGEPEPEWDNENDVVTGLTCIAVVGIEDPVRPEVPEAIKKCQRAGITVRMVTGDNINTARAIATKCGILHPGEDFLCLEGKDFNRRIRNEKGEIEQERIDKIWPKLRVLARSSPTDKHTLVKGIIDSTVSEQRQVVAVTGDGTNDGPALKKADVGFAMGIAGTDVAKEASDIILTDDNFTSIVKAVMWGRNVYDSISKFLQFQLTVNVVAVIVAFTGACITQDSPLKAVQMLWVNLIMDTLASLALATEPPTESLLLRKPYGRNKPLISRTMMKNILGHAFYQLVVVFTLLFAGEKFFDIDSGRNAPLHAPPSEHYTIVFNTFVLMQLFNEINARKIHGERNVFEGIFNNAIFCTIVLGTFVVQIIIVQFGGKPFSCSELSIEQWLWSIFLGMGTLLWGQLISTIPTSRLKFLKEAGHGTQKEEIPEEELAEDVEEIDHAERELRRGQILWFRGLNRIQTQMDVVNAFQSGGSIQGALRRQPSIASQHHDVTNVSTPTHVVFSSSTASTPVGYPSGECIS

SEQ ID NO: 24 - DNA, 4228 bp, Rattus norvegicus
  ATPase, calcium, plasma membrane, isoform 1
tgtggagaagaagggagcgtcggaccggaacggatgtatacatctcaagattgagaggaagaaacaagtcatgggccagtggtcaagatacttctctgggaattgttgctgctgataactgctttaccaagtcatacaatgagtgtttggtttaaggaagattttaatatttaaaagattttcatcttggaaaattgatcaagtgaagatttcatttctttttttttttgggaaacattttcctcctcataaattacccttgtaatgggcgacatggcaaacaactcagttgcatatagtggtgtgaaaaactctttgaaagaagctaatcatgatggcgactttggcatcacacttgccgagctgcgggccctcatggagctcaggtccacagatgcattacgaaaaatacaggaaagctatggggatgtctatggaatttgcaccaagttgaaaacatctcccaatgaaggtttaagtggaaatcctgcagatttagaaagaagagaagcagtgtttggaaagaactttatacctcctaagaagccaaaaacctttcttcagttagtatgggaagcattacaagatgtcactttaattatactagaaatcgcagccatagtatcattgggcctttctttttatcaacctccggaaggggataatgcactttgtggagaagtttctgttggggaagaagaaggtgaaggagaaacggggtggattgaaggagctgccatcctcttgtcggtggtgtgtgtggtgttagtgacggctttcaatgactggagtaaggagaaacagttccgaggcttgcagagtcgaattgaacaggaacagaagttcaccgtcatcaggggtgggcaggtcatccagatacctgtagctgacattactgttggagacattgcccaagtgaagtacggtgatcttcttccagctgatggtatattgattcaaggcaatgaccttaaaattgacgagagttcgttgactggcgagtctgaccatgttaagaagtctctagataaagaccccttgcttctttcaggtactcatgtaatggaaggttctggaaggatggtcgttactgctgtaggtgtgaactctcaaactgggatcatctttaccttacttggagctggaggcgaagaggaggaaaagaaagatgagaagaagaaagaaaagaaaaataagaaacaagatggagctattgaaaatcgcaacaaagcaaaagcccaagacggcgcggccatggagatgcagcctctgaagagtgaagaagggggagatggtgatgagaaagacaagaagaaagcaaatctgccaaagaaggaaaagtctgtgttacaagggaaacttacgaagctggctgttcagattggcaaagcaggtctgctgatgtctgccatcacggttatcatcctagtgctatattttgtgatcgataccttctgggttcagaagaggccgtggcttgctgagtgcacgccaatctacatccagtactttgtgaagttcttcattatcggggtcaccgttctagtggtcgcggtgccggaaggcctcccgctggccgtcacgatctcactggcttactccgtcaagaaaatgatgaaggataacaacttggtgaggcacctggacgcttgtgagaccatggggaacgctacagctatctgttccgataagacggggaccctgacgatgaacaggatgacggtcgttcaggcctacatcaacgaaaagcattataaaaaggttccggaaccagaagccatcccgccaaatatcctgtcctatctggtaacaggaatttctgtgaattgtgcttatacatcaaaaatattgccaccggagaaagagggtggattacctcgtcatgtggggaataaaacagaatgtgccttgttgggatttctcttggatttaaagcgggattatcaagatgttagaaatgaaataccagaagaagcattgtacaaagtctataccttcaattctgttaggaaatccatgagtacagtcctaaagaattcagatggaagtttccggatcttcagcaagggtgcatctgagataattctgaaaaagtgtttcaaaatcttgagtgctaatggtgaggccaaagtgttccgacccagagaccgagatgacattgtgaagacggtgattgagcccatggcatctgaaggcctgagaaccatatgcctagcgttcagagacttccccgcaggagagccagaaccagagtgggataacgagaacgatgtcgtcaccggccttacttgcatcgctgttgtggggattgaagatcctgtgaggcctgaggtaccagaggcaataaagaaatgtcagagggctggaattaccgtgcgcatggtcactggtgataatattaacacagctcgggccattgctaccaaatgcggtattttacacccaggggaagatttcctgtgcttagaaggtaaagattttaaccgaagaatacgaaatgaaaaaggagagattgaacaagagaggatagacaagatttggccaaagcttcgagtgcttgcaagatcatctcccactgacaaacatacactggttaaaggtataattgacagcacagtctcagagcaacgccaggttgtagctgtgacaggggatggtacaaatgacgggcctgcgctgaagaaagcagacgttggctttgcaatgggcattgctggaactgatgtggctaaagaagcatctgatatcattctcacagatgacaacttcacaagcattgttaaagcggttatgtggggacggaatgtctatgacagcatctcaaaattccttcagttccagcttactgttaatgtagtggccgtgattgtcgctttcacgggcgcttgtattactcaagactcgccactgaaggcggtacagatgctctgggtcaacctcatcatggacacgctggcctccctggctctggcgacagaaccacccaccgagtcactcctgctccggaagccttacgggagaaacaagcctctcatctcacgcacaatgatgaagaatatcttgggccatgcgttctatcagctcgtagtggtcttcacgctcttgttcgctggagagaagtttttcgatatcgacagtgggaggaacgcccctctgcatgctccaccgtcagagcactacaccattgtgttcaacacctttgtgctgatgcagctcttcaatgaaataaatgcccggaaaattcatggggaaagaaatgtgtttgaagggatcttcaacaacgccatcttctgcacaattgtcttaggcacctttgtggtgcagataataatcgtgcagtttggcgggaagcctttcagctgctcagaactttcaatagaacaatggctgtggtccatattcctgggaatggggaccttactctggggccagcttatttcaaccattccaaccagccgcttaaagtttctaaaagaagctggccatgggacacagaaggaagagatccctgaggaggaattggcggaggatgttgaagagattgaccatgccgaacgggagttgcggcgtggccagatcttgtggtttagaggcctgaacagaatccaaacacagatggatgtagtgaatgctttccagagtggaggttccattcagggggctctaaggcgacaaccctccatcgccagccagcaccatgatgtaacaaatgtttctacccctacacatgtagtgttttcctcttctactgcttctactcctgtggggtatccgagtggtgaatgcatttcgtagctctttatacgaagggttagagaagccagaatcaagaagttcaatccacaactttatgacacaccccgagtttaggatagaagattcagagccgcacatcccccttatcgatgacactgatgctgaagatgacgctcctactaaacgcaactccagccctccgccctctcctaacaaaaataacaatgccgttgacagcgggatccaccttacaatagaaatgaacaagtctgctacctcttcgtccccagggagcccactgcatagtttggaaacatcactctgattgtaagctgaacgttaacacactagccgcactgtaaagaaacaaattgaaactgagtcttttcacacattgtgacggacaagatggcgttcttgtctccggacttcaacagaagacacacttgtacgaatgtagatttattttttt

SEQ ID NO: 25 - protein, 723 aa, Rattus norvegicus
  Calcium transporter CaT2
MGVKKPWIQLQKRLNWWVREQDWNQHVDQLHMLQQKSIWESPLLRAAKENDMCTLKRLQHDQNCDFRQRGALGETALHVAALYDNLDAAIMLMETAPYLVTESTLCEPFVGQTALHIAIMNQNVNLVRALLARGASASARATGSAFHRSSHNLIYYGEHPLSFAACVGSEEIVRLLIEHGADIRAQDSLGNTVLHILVLQPNKTFACQMYNLLLSHDGGDHLKSLELVPNNQGLTPFKLAGVEGNTVMFQHLMQKRKHIQWSLGPLTSSIYDLTEIDSWGEDLSFLELVVSSKKKEARQILEQTPVKELVSLKWKKYGQPYFCLLGMLYIFYMICFTTCCVYRPLKFRDANRTHVRDNTVLEQKPLQEAYVTYQDKVRLVGELVTVIGAVVILLIEIPDIFRVGASRYFGHTVLGGPFHVIIITYASLVLLIMVMRLTSMNGEVVPISMALVLGWCSVMYFSRGFQMLGPFTIMIQKMIFGDLLRFCWLMAMVILGFASAFYIIFQTEDPESLGEFSDYPTAMFSTFELFLTIIDGPANYSVDLPFMYHLTYFAFAIIATLLMLNLFIAMMGDTHWRVAQERDELWRAQVVATTVMLERKMPRFLWPRSGICGCEYGLGDRWFLRVEHHQEQNPYRVLRYVEAFKSSDKEEVQEQLSEKQPSGTETGTLARGSVVLQTPPLSRTTSLSSNSHRGWEILRRNTLGHLNLGQDLGEGDGEEIYHF

SEQ ID NO: 26 - DNA, 4182 bp, Rattus norvegicus
  Calcium transporter CaT2
taccaggggatatatacctttcttcaccctagcagacctagactcctcagcttctgtcaccctagactgactccttccatgagattcgaataagtggctggtatttgcatgaagacatgggggtgaaaaaaccttggatccaacttcagaaacgtctcaactggtgggtcagagaacaagactggaaccagcatgtggatcagcttcatatgctacagcagaaaagtatttgggagtcaccactgcttagagcagccaaggaaaatgatatgtgcacacttaagagacttcaacatgaccagaactgtgacttccgacaaagaggagctctgggggagacagcactgcatgtagcagccctctatgacaacctggatgctgctataatgctgatggagactgctccatacttggtcacggagtctacactgtgtgagccatttgtaggtcagactgcactgcacatcgcaattatgaaccagaatgtgaacctggtccgtgccctgctagcccgaggagccagtgcctccgccagggctacaggttctgccttccatcgaagttcccacaacctcatctactatggagaacatcctttgtcctttgctgcctgtgtgggtagtgaggagattgttagactgctcattgagcatggagctgacattcgggcccaggactccttgggaaatacagtactacacatacttgtcctacagcccaacaaaacctttgcctgccagatgtacaacctgctactctcccatgatgggggagaccacctgaagtccctggaacttgtgcccaacaaccaaggactcacccccttcaagctggctggggtggaaggcaacactgtgatgtttcaacacctgatgcaaaaacggaagcacatccagtggtcattaggacccctaacatcttccatttatgatctcacagaaattgactcctggggtgaggacttgtcctttctggagcttgtggtttcctccaagaagaaagaggctcgtcagattctagaacaaacccctgtgaaggagctggtgagcctgaagtggaagaaatatggacaaccctatttctgcctcctgggtatgctgtacatcttctacatgatctgcttcaccacatgctgtgtttaccgccccctcaagttccgtgatgccaaccgtacacatgttagagataacaccgtcctggaacagaaaccactacaggaagcgtatgtgacttaccaggataaggtccggctggtgggagaactcgtgacagtcattggggctgtggttattctactcatagagatcccagacatcttcagagttggtgcctctcgctactttggacacacagttcttgggggtccattccatgtcattatcatcacatatgcctcccttgtgctactgattatggtgatgaggcttaccagtatgaatggggaggtggtccccatatccatggccttggtactgggctggtgtagtgtcatgtacttctcccgaggattccagatgctgggccccttcacaatcatgattcagaagatgatttttggagacctactgcgcttctgctggctaatggctatggtcatcctcggatttgcctctgccttctatatcatcttccagacagaggatccagagagtctgggagaattctccgactaccctacagcaatgttcagcacctttgagctcttccttaccatcattgacggtccggccaattacagtgtggatctacccttcatgtaccacctaacctattttgcttttgccatcatcgccacactactcatgctcaatttgttcattgccatgatgggtgacactcactggcgagtggcccaggagagggacgaactctggagagcacaggttgtagccaccacagtgatgctggagaggaaaatgccccgtttcctgtggcctcgctctggtatctgtggttgcgaatatggcctgggagaccgctggttcttacgggttgaacaccaccaggagcagaatccgtatcgagtacttcgctatgtggaagctttcaaatcttcagacaaggaggaagtacaagaacaactatctgagaagcagccttccgggactgagactgggactttagctagaggctctgtggttctgcaaacgcctcctttgtccaggactacatccctaagcagcaatagccaccgtggatgggaaattctccgtcgaaacaccctgggacatttgaatcttggacaagaccttggtgagggagacggagaggagatctaccatttctgaagagaattctgtttctctagacctagccccaggtgggccagggtgtagaagagaaaggggtagttaggggtgggcagggagaaggagagagctgatttgcaagaatctgaattctatggttatgaatagttggagggtatgggcagtggccatcttgtgttgtatgtaccttataagttcctctaaagctcatttcctgagaaccaggcatctgagcatatgaaatggaggctaattgtcatcttgggttgacatctagaccatctattttgtgccttgaatagaaccagaaagcagtaagtcaggaaacttgcccgattctataacgtataatgtggaaagaaccatcataccatgaacatccttcccatctctttagacttcctaggactctcttcccagctagcaaatcccaatgtagaaaactacaggaaaaaaaatatttccttatcctgttttaatttttctcttatgtcaaaaaaatatacattacataaaacttatcatttttactattttcagtataaagtacattcagattattgtataaatatcactagtattcatctacaaaaggttttcatctcagacaccaaaactcctgtccactgaacaataactctctactattccttctcgttagtcctcaataaccattattttacttcctgactatgaattgattgtaggtgctttatttaaaaaccgactggaaaagacatgatccgttgcacttgccttgttttgtttaatatagtagtttcaaggtttcttctattctctagaggtatcagaatttcatttctctttaagtctgaatatctacaccttacttcattcatccatctatcaatgagttttcttatcttctgtttactgtgaacattgctgctatgaaaataaagtgtgcatgtctatagagatttaaggttttgggtaatttattcacagttccggtgtagtcactggattgaacaggacacaaggatgaaataaccatctggctcagaaaactaaacattcatttaaaagaatacaaaatcaaaacagagcaatgatattctaacccccagtcccacagaagtataatttaaacaaatatcaaaactttattaatggaaaacacattcaccagagaacattcaaaagttagcaagaccatttccacaccctctggaaaccagtacagacaaaataaggtgagcatttcctaagatgtccccatcagctcttacagcatcactaccaagcgagtacggactgacagttaacacaacaaaacttagccgtcttgctcataactatggacttaactattcaaagccaatactgacagttttgttatctgtcaccatcccagactgaggatatatttaaattcaagctataaagatactgaaatactaattaacaatctttaaatacagtgagaaagaccaacttatgttaaaacttttgaatgtgaaactaaataaaagccatctgaaatctgtttccaagcttaaaaccctgcctagtattactgtacacacacctcactaaacgtgtggatgtcataaaccaaaatgtctttttcccctccatgtctttggcctttccaaattgtgaattatgaattctttttttaacaaacattttccaatgacattgtgctttattatttttttagaaaaaagttaaagtatataataaactggtaaccttagtctcttttattgctctagaatatcctaattataaaaaaaggtaagagtaaccccaaagacagaggtgtgttgtgaaagtgtattagtttccctcttctagggaccaaatgtaggcacctttcctcccatcttcagaaccactgaggcaagaggcctggactgaaggaatatgaccctgtcacctcaga

SEQ ID NO: 27 - protein, 301 aa, Rattus norvegicus
  Carnitine/acylcarnitine carrier protein
MAEEPKPISPLKNLLAGGFGGVCLVFVGHPLDTVKVRLQTQPPSLPGQPPMYSGTIDCFRKTLFREGITGLYRGMAAPIIGVTPMFAVCFFGFGLGKRLQQKSPEDELTYPQLFTAGMLSGVFTTGIMTPGERIKCLLQIQASSGKNKYSGTLDCAKKLYQEFGIRGFYKGTALTLMRDVPASGMYFMTYEWLKNLFTPQGKSVHDLSVPRVLVAGGFRGIFNWVVAIPPDVLKSRFQTAPPGKYPNGFRDVLRELIREEGVTSLYKGFNAVMIRAFPANAACFLGFEIPMKILNWIAPNL

SEQ ID NO: 28 - DNA, 1231 bp, Rattus norvegicus
  Carnitine/acylcarnitine carrier protein
acagcgacgaagatcaagactgccaggagctgcaagtagactgacagaagactgaccatggcagaggagccgaaacccatcagtccgcttaagaacctccttgccggcggctttggcggcgtgtgcctggtgtttgtggggcaccccttggacacggtcaaggtccgactgcagacacaaccaccaagtttgcctgggcagccacctatgtactctgggaccatcgactgtttccggaagactctttttagagagggcatcacagggctgtatcggggcatggctgcacccatcattggagtcacccctatgtttgcggtgtgcttctttgggtttggtttgggaaagagactacagcagaaatctccagaggatgaacttacctacccgcagctgtttacagctgggatgttatctggtgtgttcaccacaggaatcatgacccctggagaacggatcaaatgcttactgcagattcaggcttcttcagggaaaaacaaatacagtggtaccttggactgtgcaaagaagctgtatcaggagtttgggatccgtggcttctacaaagggactgcgctcactctcatgcgagatgttcctgccagtgggatgtatttcatgacatacgaatggcttaaaaatctcttcactccacagggaaagagtgtccatgacctcagtgtgcctcgggtcctggtggctggcggctttcgagggatcttcaattgggttgtggcaatccccccagacgtgctcaagtctcgattccagaccgcacctcctggaaaatatcctaatggtttcagagatgtgttgagagagctgatccgagaagaaggagtcacctccttgtacaaagggttcaatgcagtcatgatccgagccttcccagccaatgctgcctgtttccttggctttgaaattccgatgaagatcctcaattggattgcccccaacttgtgaggctgaagacatgttgaagacctttggatgctggaagactgttgccgagaagcaggggcaggactgggaagaccctgagggtgaggggagggaagtggtgtgatcagagccccaggcatgactgtgatggtgaaactgttgccttaatgacatcctctaccttatgtaacttggtgccattttgaaacttgaatatagaaggtttccagagaattggagatggaataaatagtttatagactcgtcaaaaaaaaaaaaaaaaaaaaaa

SEQ ID NO: 29 - protein, 516 aa, Homo sapiens
  Potent brain type organic ion transporter
MASDPIFTLAPPLHCHYGALPPNASGWEQPPNSSGVSVAGAALAASAASRVVTSTDPSCSGFAPPDFNHCLKDWDYNGLPVLTTNAIGQWDLVCDLGWQVILEQILFILGFASGYLFLGYPADRFGRRGIVLLTLGLVGPCGVGGAAAGSSTGIMTLRFLLGFLLAGVDLGVYLMRLELCDPTQRLRVALAGELVGVGGHFLFLGLALVSKDWRFLQRMITAPCILFLFYGWPGLFLESARWLIVKRQIEEAQSVLRILAERNRPHGQMLGEEAQEALQELENTCPLPTTSTFSFASLLNYRNIWKNLLILGFTNFIAHAIRHCYQPVGGGGSPSDFYLCSLLASGTAALACVFLGVTVDRFGRRGILLLSMTLTGIASLVLLGLWDYLNDAAITTFSVLGLFSSQASAILSTLLAAEVIPTTVRGRGLGLIMALGALGGLSCPAQRLHMGHGAFLQHVVLAACALLCILSIMLLPETKRKLLPEVLRDGELCRRPSLLRQPPPNRCDHVPLLATS

SEQ ID NO: 30 - DNA, 2375 bp, Homo sapiens
  Potent brain type organic ion transporter
ccacgcgtccgggaggcgcccgcggctgcagagctgcagagcggggtctcccggccctcggcgtcccagccctttgcacatagctgggccagacaacaactcattctctcggcgcggccgtcagggccccagcggtcggcaagctggctccccgagtagccaccgggacccccgagcccaatggcgggggcggcaacaaaatcgacagcaccgtggagatcgcccccggcgccaatggacaggtcgggagcctcggagatgcggtcccccccgagcagctgcagggtgagcgggagcgccggcgggagggggagggcgacgcgctgggcagcagcctgtcgctggccgcgcccccgggccccctcagcttcgaggctctactggcccaggtgggggccctgggtggcggccagcagctgcagctcggcctgtgctgcctgcccgtgctcttcgtggcgctgggcatggcctcagaccccatcttcacgctggcgcccccgctgcactgccactacggcgccttgccccccaacgcttcgggctgggagcagccccccaactccagcggcgtcagcgtcgccggcgcagccctagcagccagcgccgccagcagagtcgtcaccagtacggacccctcgtgcagtggcttcgccccaccggatttcaaccactgcctgaaggactgggactacaacggactgcccgtgctcaccaccaatgccatcggccagtgggatctggtgtgtgacctgggctggcaggtgatcctggagcagatcctcttcatcttgggctttgcctccggctacctgttcctcggttaccccgcggacaggtttggccgtcgtgggattgtactgctgaccttggggctcgtgggcccctgtggagtgggaggagctgctgcgggctcctccacgggcataatgactcttcgattcctcctgggcttcctgctggctggcgttgaccttggtgtctacctgatgcgcctggagctgtgcgacccaacccagaggcttcgggtggccctggcaggggagttggtaggggtgggagggcacttcctgttcctgggcctggcccttgtctctaaggactggcggttcctgcagcgaatgatcaccgctccttgcatcctcttcctgttttatggctggcccggtctgtttctggagtccgcacggtggctgatagtgaaacggcagattgaggaagcccagtctgtgctgaggatcctggctgagcgaaaccggccccatggccagatgctgggagaagaggcccaggaagccctgcaggagctggagaatacctgtcctctccccacaacgtccaccttttccttcgcctccctcctcaactaccgaaacatctggaaaaatctgcttatcctgggcttcaccaactttatcgcccatgccattcgccactgctaccagcctgtgggaggaggagggagcccatcagacttctacttgtgctctcttctggccagcggcacagcagccctggcctgcgtcttcctgggggtgaccgtggaccgttttggccgtcggggcatcctgcttctctcaatgactctcacggggattgcatccctggtcttgctgggcctgtgggattatctgaacgatgctgccatcacaaccttctcggtcctcggactcttctcctcccaagcttctgctatcctcagtaccctccttgctgctgaagtcatccccaccactgtccggggccgtggcctgggccttatcatggcacttggggcgcttggagggctgagctgtccagctcagcgcctccacatgggccatggagctttcctgcagcatgtggtactggcggcctgtgccctcctctgcatccttagcatcatgctgctgccagagaccaagcgcaagcttctgccagaggtactccgggatggggaactgtgccgtcggccttccctgctgaggcagccacctcctaaccgctgtgaccatgtccccctgctagccacttcctaatcctgccctctaagcagcctctgagcctggtgggaggctggccatttagaaaggtgacggagggctggctagcaagatagacggagaggcaaggccaccctgtacatacaaaaggctccaaggcgcctcacgccatctaggagagctcagagtgccattcccaaccccctctcctccccgctgctttctgttcacttcatcagcaagagtcaggacggggatagcatctcgctataaccgttaggtctgggatccatcctatgcccaaagacattttcccagaccttgctctttctcgctcttcattctgtttcaataaaagacattttgaataaatgagcaaaaaaaaaaaaaaaaaaa

SEQ ID NO: 31 - protein, 322 aa, Rattus norvegicus
  UDP galactose transporter
MAASRSLVPDRLRLPLCFLGVFVCYFYYGILQEKITRGKYGEGPKQETFTFALTLVFIQCVINAMFAKILIQFFDTARVDRTRTWLYAACSVSYVGAMVSSNSALQFVNYPTQVLGKSCKPIPVMLLGVTLLKKKYPLAKYLCVLLIVAGVALFMYKPKKVVGIEEHTVGFGELLLLLSLTLDGLTGVSQDHMRAHYQTGSNHMMLNINLWSTVLLGAGILFTGELWEFLSFAERYPTIIYNILLFGLTSALGQSFIFMTVVYFGPLTCSIITTTRKFFTILASVILFANPISSMQWVGTVLVFLGLGLDAKFGKGTKKTSH

SEQ ID NO: 32 - DNA, 1156 bp, Rattus norvegicus
  UDP galactose transporter
cctggagctttcgccttcgcctccggtaccgctacctgttctgaacggatctccggccgactcgtccctgcgtctcatggccgctagcagatccctggtgcccgaccggctgcgcctaccactctgcttcttgggtgtctttgtctgctacttctactatgggatcctgcaggagaagataacaagaggaaagtatggagaaggacccaaacaggagacattcacctttgccttaactttggttttcatccagtgtgtgatcaatgctatgtttgccaagatcttgatccagttttttgacactgccagggtggatcgcactcggacctggctctatgctgcctgctctgtctcctatgtgggcgccatggtctccagcaactcagcactacagtttgtcaactatccaactcaggtccttggtaaatcctgcaagccaatcccagttatgctcctcggagtgaccctcttgaagaagaagtacccattggccaagtacctgtgtgtgttgctaattgtggctggcgtggctcttttcatgtataagcccaagaaggtggttgggatagaagagcacacggtcggctttggagagctccttctgctcttgtctctgaccctggatggactgacaggtgtttcccaggaccatatgcgggctcattaccaaacaggttccaatcacatgatgttgaacatcaacctttggtccacggtcttgctcggtgctgggatcctgtttactggggagctctgggagttcttgagtttcgccgagaggtacccgaccatcatctataacatcctgctctttggcttgaccagtgccttgggtcagagctttatcttcatgacagtcgtgtacttcggccccctgacctgctccatcatcaccacgactcggaagttcttcaccatcttggcttctgtgatcctctttgccaatcccatcagctccatgcagtgggtgggcaccgtgctggttttcctgggtctgggtcttgatgccaagtttgggaaaggaacaaagaagacctcccactaggaaaagagaggcttcctccactccagaaacacttaaattattatctccaacagtgacatcttgggaaaatggactcagtcacgataagggactgggttccaatctttttat

SEQ ID NO: 33 - protein, 635 aa, Rattus norvegicus
  CHOT1
MAKKSAENGIYSVSGDEKKGPLIVSGPDGAPSKGDGPAGLGAPSSRLAVPPRETWTRQMDFIMSCVGFAVGLGNVWRFPYLCYKNGGGVFLIPYVLIALVGGIPIFFLEISLGQFMKAGSINVWNICPLFKGLGYASMVIVFYCNTYYIMVLAWGFYYLVKSFTTTLPWATCGHTWNTPDCVEIFRHEDCANASLANLTCDQLADRRSPVIEFWENKVLRLSTGLEVPGALNWEVTLCLLACWVLVYFCVWKGVKSTGKIVYFTATFPYVVLVVLLVRGVLLPGALDGIIYYLKPDWSKLGSPQVWIDAGTQIFFSYAIGLGALTALGSYNRFNNNCYKDAIILALINSGTSFFAGFVVFSILGFMATEQGVHISKVAESGPGLAFIAYPRAVTLMPVAPLWAALFFFMLLLLGLDSQFVGVEGFITGLLDLLPASYYFRFQREISVALCCALCFVIDLSMVTDGGMYVFQLFDYYSASGTTLLWQAFWECVVVAWVYGADRFMDDIACMIGYRPCPWMKWCWSFFTPLVCMGIFIFNVVYYKPLVYNNTYVYPWWGEAMGWAFALSSMLCVPLHLLGCLLRAKGTMAERWQHLTQPIWGLHHLEYRAQDADVRGLTTLTPVSESSKVVVVESVM

SEQ ID NO: 34 - DNA, 3972 bp, Rattus norvegicus
  CHOT1
gggagttaccacacggtcttccaagggcactgccaaggatggagtttctaggacggtcagggtagcatttgcggaaacagagccagctgagttctgggcagtgcagctgtagacccccatgtcgtcgactttcacatcagtgatgaagaacacatcgtcatctggcataacgtgcatgcgtcgctctcgagctgcagggaaatcggtgcctccatccttctgccaggcaatctgagggttagggtggcccgtggcagcacactcgaggcgtgctgtggtgcccgtccgaatggcaatgtcatggggtattttggtgaatgaaggcaacacattcacagtgagcctggctttgtgtgagtatgtggagccgaagtggtttgtgatgacacactggtagcggccctcgtgtccaaacgtgacgtgacggaggtgcaggatggtggtgtactccatcacttcgccgtcccgcacccctcccgcccgcccgtcgccccgtcccccggcccggccgcccccgaggcccccgggcgggcccgcgctttcggggccctttctccaggtgccaccggagccccttgcccgctcgccaccctcgagacgccgcgacccctggcctggcctcgcggcccaggggccatggcgaagaagagcgctgaaaacggtatctatagcgtgtctggagacgagaagaagggtcctctcatcgtgtccgggcccgatggtgccccgtccaagggcgatggccctgcgggcctgggggcgcccagcagccgccttgctgtgccgccgcgagagacttggacacgccagatggacttcatcatgtcgtgcgtgggcttcgccgtgggcctcggtaacgtgtggcgcttcccctacctgtgctacaagaacggcggaggtgtgttccttattccctatgtcctgattgccctggttggaggaatccccattttcttcctggaaatctcactgggccagttcatgaaggccggcagcatcaatgtctggaacatctgtcccctattcaaaggtctgggctatgcctccatggtgattgtcttctactgcaacacttactacatcatggtgctggcctggggcttctattacctggtcaagtcctttactaccactttgccatgggctacgtgtggccacacctggaacactcctgactgtgtagagatctttcgccatgaagactgtgccaatgccagcttggccaacctcacatgtgaccagcttgctgaccgacggtcccctgtcatcgagttctgggagaacaaagtcttgaggctctccacagggctggaggttccaggagccctcaactgggaagtgaccctgtgcctgctggcctgctgggtgctggtctacttctgtgtgtggaagggggtcaagtcaacaggaaagatcgtgtacttcactgctacattcccctacgtggtcctcgttgtgctgctggtgcgaggggtgctgctgcctggagccctggatggtatcatctactatctcaagcctgactggtcaaagctagggtcccctcaggtatggatagatgctgggacccagattttcttctcttatgccatcggcctgggggccctcacagccctaggcagctacaatcgcttcaacaacaactgctacaaggatgccatcatcctggcactcatcaacagcgggaccagcttctttgctggctttgtggtcttctccatcctgggcttcatggccacagagcagggtgtgcatatctccaaggtggcagaatcagggcctggtctagccttcattgcctacccacgggctgtcacactgatgcctgtggccccactctgggctgccttgttcttcttcatgctgctgctgctcggtctggacagccagtttgtaggtgtggagggcttcatcactgggctcctggatctcctcccggcctcctactacttccgttttcaaagggagatctccgtggccctctgttgtgccctctgctttgtcatcgatctctccatggtgactgatggcgggatgtacgtcttccagctgtttgactactactcagctagtggcactaccctgctttggcaagccttttgggagtgtgtggtggtggcttgggtttatggagctgaccgcttcatggacgatattgcctgtatgattgggtaccgaccttgcccttggatgaaatggtgctggtccttcttcaccccactggtctgcatgggcatcttcatcttcaatgttgtgtactacaagccactggtctacaacaatacctacgtgtacccatggtggggtgaagctatgggctgggcctttgcactctcttctatgctctgtgtgcccctccacctcctgggctgtctcctcagggcaaaaggaaccatggcagagcgatggcagcacctgacccagcctatctggggcctccatcacttggaatacagagctcaggatgcagatgtcaggggcctgaccaccctgactcccgtgtccgagagcagcaaggtcgtcgtggtggagagtgtcatgtgacaggcacccccagctcacatcaccagctcatcctttggtagccatagcagccccagctttagcccccacccatccctcgggggcttgcctttccttgacagtttggggatctgcctggggaaagggaggaagcaccatgagtgctaacaaaaacaactttttccatttttaataaaacgccaaaaacatcacaacccaccaaaaatagatgcctctcctccccaccccacaactacgctggtattttcgttgcttccagtccccacctcctttccttcttcccagtgcccaggacccatctcctagccttgccaagcccatctgcctgcctcccaagctctgctctgtaacacacctttgccctagaaccaacagtggcagcttggggaacaggagaggagggaaaataacagtaggacaggaggggaggcaagagagggacagtggaaccaaggtgaatatttcagctcaattagaactcttcccgcccctattctagaagctagagagccagtcagcaatggaaccttgtgttcctgcgccaattgccaccaatattaattgtgtgagcttgggtctgagtgcacgtctgtctctgtgtgatgtgtgtgtgtgtgtgtgtgtgtgtgtgtgtgtgtgtgtgtgtgtgtgtgtgtagatctcttatctcttagtgaaggtgaataccagaagtaaacagagcctctgggcaaaggaggcttatattttgcacattttataagaaaaaaaaacttgagagtgagacttctgcttgtatatttctaaaaagcccccaccatcccccatttccactcctttccttgacatccccaccttctctgaccctagccaaggagtgtgaatttatagacttaattttcataggcaaaacaaaagcttcaggctgttgaatatgtgagtctgtttgtgtggatgttctgtatggtctccagccagagactggagtaggaaggtgggagcctcaatggtgtccccacactgttcctttgcctctaagtctgtggggtagaaggctgtaacattatcccagggaatctgggtctgctcacctgacatgctcagacttgcccacacccagctccctgggctgggcatgattgcagggatttcccatggacatagcccagggaagggatcctgggtatggcttccacttccaagctaaaggctgatgtgctttcgacatctcaagtcttccgtgtagcagcttaaacccacatctgtgtcccatcaagcctgaaacagccaagtagccattagaaaggctttcttcacacagagctggactaagccagggaggtggggctgggtaagggtgcaagcctttggggacattcttactgtgctaaaaaagccactgcaaacatagcaataaaaacacttccattttccaaaaaaaaaaaaaaa

SEQ ID NO: 35 - protein, 447 aa, Rattus norvegicus
  Rab GDI alpha
MDEEYDVIVLGTGLTECILSGIMSVNGKKVLHMDRNPYYGGESSSITPLEELYKRFQLLEGPPESMGRGRDWNVDLIPKFLMANGQLVKMLLYTEVTRYLDFKVVEGSFVYKGGKIYKVPSTETEALASNLMGMFEKRRFRKFLVFVANFDENDPKTFEGVDPQTTSMRDVYRKFDLGQDVIDFTGHALALYRTDDYLVQPCLETINRIKLYSESLARYGKSPYLYPLYGLGELPQGFARLSAIYGGTYMLNKPVDDIIMENGKVVGVKSEGEVARCKQLICDPSYIPDRVRKAGQVIRIICILSHPIKNTNDANSCQIIIPQNQVNRKSDIYVCMISYAHNVAAQGKYIAIASTTVETAEPEKEVEPALELLEPIDQKFVAISDLYEPIDDGSESQVFCSCSYDATTHFETTCNDIKDIYKRMAGSAFDFENMKRKQNDVFGEADQ

SEQ ID NO: 36 - DNA, 1401 bp, Rattus norvegicus
  Rab GDI alpha
aagagcgggcgctggtaccaaggcctgaccatggatgaggaatacgatgtgattgtgctggggacaggtcttaccgaatgcatcctgtctggcatcatgtctgtgaatggaaagaaggtgttgcacatggaccgaaacccctactatgggggtgagagctcttctatcacaccccttgaggagctatataagcgctttcagttgctggaagggccccctgaatcaatgggccggggccgagactggaatgttgacttgatccccaaattcctcatggccaatggtcagctggtaaagatgctactgtatacagaagtgactcgttatctggacttcaaggtggtagagggcagctttgtatacaaagggggcaagatctacaaagtgccatctactgagactgaggccttggcttctaatctgatgggcatgtttgaaaaacgacgcttccgaaaatttttggtgtttgtggcaaactttgatgagaatgaccccaaaacctttgagggtgttgacccgcagaccaccagcatgcgtgatgtctaccggaagtttgacctgggccaagatgtcattgatttcactggccatgccctggcgctctaccgcactgatgattacctggttcagccatgtcttgagactattaaccgcatcaagttgtacagtgagtccctggcccggtatggcaagagcccatatttgtacccactctatggcctgggtgagctgcctcagggctttgccagattgagtgccatctatgggggaacatacatgctgaacaaaccagtggatgacatcatcatggaaaatggcaaggtggtgggtgtaaaatctgagggagaggtggcccgctgcaagcagctgatctgtgatcccagctacatcccagaccgtgtgcgaaaggctggccaggttattcgcatcatctgcatcctcagccaccccatcaagaataccaatgatgccaattcctgccaaattatcatccctcagaatcaggtcaacaggaagtcagacatctatgtgtgcatgatctcctatgcacacaacgtggccgcacaaggcaaatacatcgccattgccagcaccaccgtagagactgcagaaccagaaaaggaggttgagcctgcattggagctgttggaacctattgaccaaaagtttgtggctatcagtgatttatatgagcccattgatgacggttcagagagtcaggtgttctgttcctgctcctatgatgctaccacacactttgagacaacctgcaatgacatcaaagatatctacaaacgcatggctggttctgcctttgattttgagaacatgaagcgcaaacagaatgatgtctttggagaagccgatcagtgattgctgactcccctcctccagcccctg

SEQ ID NO: 37 - protein, 368 aa, Rattus norvegicus
  Core histone
MSSRGGKKKSTKTSRSAKAGVIFPVGRMLRYIKKGHPKYRIGVGAPVYMAAVLEYLTAEILELAGNAARDNKKGRVTPRHILLAVANDEELNQLLKGVTIASGGVLPNIHPELLAKKRGSKGKLEAIITPPPAKKAKSPSQKKPVAKKTGGKKGARKSKKQGEVSKAASADSTTEGAPTDGFTVLSTKSLFLGQKLQVVQADIASIDSDAVVHPTNTDFYIGGEVGSTLEKKGGKEFVEAVLELRKKNGPLEVAGAAVSAGHGLPAKFVIHCNSPVWGSDKCEELLEKTVKNCLALADDRKLKSIAFPSIGSGRNGFPKQTAAQLILKAISSYFVSTMSSSIKTVYFVLFDSESIGIYVQEMAKLDAN

SEQ ID NO: 38 - DNA, 1172 bp, Rattus norvegicus
  Core histone
cgtgagcttgctgatctgtttctggggccgtcgccatgtcgagccgtggtgggaagaagaaatccaccaagacctcccggtcagccaaggccggggtcatcttccccgtgggacggatgctgcggtacatcaagaaaggccaccctaagtatcggatcggagtgggggcgcctgtgtacatggctgccgtactggaatacctgaccgctgagatcctggagctggccggcaatgcagcgagagacaacaagaaggggcgggtcacgccgcggcacatcctgttagcagtggccaatgatgaggagctaaaccagctgctaaaaggagtcaccatagccagtgggggcgtgttgccgaacatccatcctgagttgctagcgaagaaacgaggatccaagggaaaattggaagccatcatcacgcctccaccagccaaaaaggccaagtctccatcccagaagaagccagtggctaagaaaacaggaggcaagaaaggggcccggaagtctaagaagcagggagaagtcagcaaggcagccagcgcagacagtacaacggagggcgcgcctacagacggctttactgtcctctctaccaagagcctcttcctcggccagaagttgcaagttgttcaggctgacattgcctcgatcgacagtgatgctgtcgttcacccgacaaacactgacttctacatcggtggtgaagtaggaagcacactggagaagaaaggtggcaaggagtttgtagaagctgttctggaacttcggaaaaagaacgggcccttggaagtagctggagctgctgttagtgcaggccacggcctgcctgccaagtttgtgatccactgtaacagtcctgtctggggctcagacaaatgtgaagaacttctagaaaagacggtgaaaaactgcctggctctagctgatgacagaaagctgaagtccatcgccttcccgtctattggcagtggcaggaacgggttcccgaagcagacagccgcccaactcattctgaaggccatctccagctactttgtgtccactatgtcgtcctccatcaaaactgtgtactttgtgctttttgacagtgagagcataggcatctacgtgcaggaaatggccaaactggatgccaactaggccagcgttccctagagccagcacatgtcg

SEQ ID NO: 39 - protein, 749 aa, Mus musculus
  Stat1
MSQWFELQQLDSKFLEQVHQLYDDSFPMEIRQYLAQWLEKQDWEHAAYDVSFATIRFHDLLSQLDDQYSRFSLENNFLLQHNIRKSKRNLQDNFQEDPVQMSMIIYNCLKEERKILENAQRFNQAQEGNIQNTVMLDKQKELDSKVRNVKDQVMCIEQEIKTLEELQDEYDFKCKTSQNREGEANGVAKSDQKQEQLLLHKMFLMLDNKRKEIIHKIRELLNSIELTQNTLINDELVEWKRRQQSACIGGPPNACLDQLQTWFTIVAETLQQIRQQLKKLEELEQKFTYEPDPITKNKQVLSDRTFLLFQQLIQSSFVVERQPCMPTHPQRPLVLKTGVQFTVKSRLLVKLQESNLLTKVKCHFDKDVNEKNTVKGFRKFNILGTHTKVMNMEESTNGSLAAELRHLQLKEQKNAGNRTNEGPLIVTEELHSLSFETQLCQPGLVIDLETTSLPVVVISNVSQLPSGWASILWYNMLVTEPRNLSFFLNPPCAWWSQLSEVLSWQFSSVTKRGLNADQLSMLGEKLLGPNAGPDGLIPWTRFCKENINDKNFSFWPWIDTILELIKNDLLCLWNDGCIMGFISKERERALLKDQQPGTFLLRFSESSREGAITFTWVERSQNGGEPDFHAVEPYTKKELSAVTFPDIIRNYKVMAAENIPENPLKYLYPNIDKDHAFGKYYSRPKEAPEPMELDDPKRTGYIKTELISVSEVHPSRLQTTDNLLPMSPEEFDEMSRIVGPEFDSMMSTV

SEQ ID NO: 40 - DNA, 2277 bp, Mus musculus
  Stat1
caggatgtcacagtggttcgagcttcagcagctggactccaagttcctggagcaggtccaccagctgtacgatgacagtttccccatggaaatcagacagtacctggcccagtggctggaaaagcaagactgggagcacgctgcctatgatgtctcgtttgcgaccatccgcttccatgacctcctctcacagctggacgaccagtacagccgcttttctctggagaataatttcttgttgcagcacaacatacggaaaagcaagcgtaatctccaggataacttccaagaagatcccgtacagatgtccatgatcatctacaactgtctgaaggaagaaaggaagattttggaaaatgcccaaagatttaatcaggcccaggagggaaatattcagaacactgtgatgttagataaacagaaggagctggacagtaaagtcagaaatgtgaaggatcaagtcatgtgcatagagcaggaaatcaagaccctagaagaattacaagatgaatatgactttaaatgcaaaacctctcagaacagagaaggtgaagccaatggtgtggcgaagagcgaccaaaaacaggaacagctgctgctccacaagatgtttttaatgcttgacaataagagaaaggagataattcacaaaatcagagagttgctgaattccatcgagctcactcagaacactctgattaatgacgagctcgtggagtggaagcgaaggcagcagagcgcctgcatcgggggaccgcccaacgcctgcctggatcagctgcaaacgtggttcaccattgttgcagagaccctgcagcagatccgtcagcagcttaaaaagctggaggagttggaacagaaattcacctatgagcccgaccctattacaaaaaacaagcaggtgttgtcagatcgaaccttcctcctcttccagcagctcattcagagctccttcgtggtagaacgacagccgtgcatgcccactcacccgcagaggcccctggtcttgaagactggggtacagttcactgtcaagtcgagactgttggtgaaattgcaagagtcgaatctattaacgaaagtgaaatgtcactttgacaaagatgtgaacgagaaaaacacagttaaaggatttcggaagttcaacatcttgggtacgcacacaaaagtgatgaacatggaagaatccaccaacggaagtctggcagctgagctccgacacctgcaactgaaggaacagaaaaacgctgggaacagaactaatgaggggcctctcattgtcaccgaagaacttcactctcttagctttgaaacccagttgtgccagccaggcttggtgattgacctggagaccacctctcttcctgtcgtggtgatctccaacgtcagccagctccccagtggctgggcgtctatcctgtggtacaacatgctggtgacagagcccaggaatctctccttcttcctgaaccccccgtgcgcgtggtggtcccagctctcagaggtgttgagttggcagttttcatcagtcaccaagagaggtctgaacgcagaccagctgagcatgctgggagagaagctgctgggccctaatgctggccctgatggtcttattccatggacaaggttttgtaaggaaaatattaatgataaaaatttctccttctggccttggattgacaccatcctagagctcattaagaacgacctgctgtgcctctggaatgatgggtgcattatgggcttcatcagcaaggagcgagaacgcgctctgctcaaggaccagcagccagggacgttcctgcttagattcagtgagagctcccgggaaggggccatcacattcacatgggtggaacggtcccagaacggaggtgaacctgacttccatgccgtggagccctacacgaaaaaagaactttcagctgttactttcccagatattattcgcaactacaaagtcatggctgccgagaacataccagagaatcccctgaagtatctgtaccccaatattgacaaagaccacgcctttgggaagtattattccagaccaaaggaagcaccagaaccgatggagcttgacgaccctaagcgaactggatacatcaagactgagttgatttctgtgtctgaagtccacccttctagacttcagaccacagacaacctgcttcccatgtctccagaggagtttgatgagatgtcccggatagtgggccccgaatttgacagtatgatgagcacagtataaacacgaatttctctctggcgaca

SEQ ID NO: 41 - protein, 2148 aa, Rattus norvegicus
  Transcription factor IIIC, alpha subunit
MDALESLLDEVALEGLDGLCLPALWSRLESRSPAFPLPLEPYTQEFLWRALVTHPGISFYEEPRERPDLQLQDRYEEIDLETGILESRRDPVTLEDVYPIHMILENKDGIQGSCRYFKERKDITSSIRSKCLQPRCTMVEAFSRWGKKLIIVASQDMRYRALIGLEGDPDLKLPDFSYCILERLGRSRWQGELQRDLHTTAFKVDAGKLHYHRKILNKNGLITMQSHVIRLPTGAQQHSILLLLNRFHVDRRSKYDILMEKLSMMLSTRSNQIETLGKLREELGLCERTFKRLYQYMLNAGLAKVVSLPLQEIHPECGPCKTKKGTDVMVRCLKLLKEFRRKMEDDHDDDDDEEAISKAVPPVDIVFERDMLTQTYELIERRGTKGISQAEIRVAMNVGKLEARMLCRLLQRFKVVKGFMEDEGRQRTTKYISCVFAEESDLSRQYAREKARGELLTTVSLASVQDESLMPEGEEAFLSDSESEEESSCSGKRRGRGSRGHSRASGDAGPGSRPHHSTPAKGGWKVLNLHPLKKPKSAAVERSRRSSACRDGLDTSSSSELNIPFDPHSMDSHSGDIAVIEEVRLDNPKEGGGSQKGGRHGSGQDKPHKTYRLLKRRNLIIEAVTNLRLIESLFTIQKMIMDQEKQEGVSTKCCKKSIIRLVRNLSEEGLLRLYRTTVIQDGIKKKVDLVVHPSMDQNDPLVRSAIEQVRFRISNSSTANRVKVPPAPAPQEEAEEGNQEPEVPSRSADSEANTSSKPESTRVKKTDEKMGITPLKNYKPVIVPGLGRSIGFLPKMPRLRVMHLFLWYLVYGHPASHTGEQPTFHSERKTGKQEPSRPGVQPSSGDDWDSSEAKNSTESSSWEAEMELSTERVYVDEISWMRYVPPIPIHRDFGFGWALVSDILLCLPLSIFVQVVQVSYKVDNLEDFLNDPLKKHTLIRFLPRHIRQQLLYKRRYIFSVVENLQRLCYMGLLQFGPTEKFQDKDQVFVFLKKNAVIVDTTICDPHYNLAHSSRPFERRLYVLDSMQDVESYWFDLQCICLNTPLGVVRCPCAQKICPDPGSDPEGSLRKEQESAMDKHNLERKCAMLEYTTGSREVVDEGLVPGDGLGAAGLDSSFYAHLKRNWVWTSYIINKARKNNTSENGLTGRLQTFLSKRPMPLGSGGSGRLPLWSEGKADAELCADKEEHFELDREPTPGRNRKVRGGKSQKRKRLKKEPIRKTKRRRRGEHPEAKSKKLRYQDEADQNALRMMTRLRVSWSMQEDGLLMLCRIASNVLNTKVKGPFVTWQVVRDILHATFEESLDKTSHSVGRRARYIVKNPQAFMNYKVCLAEVYQDKALVGDFMSRKDNYEDPKVCAKEFKEFVEKLKEKFSSGLRNPNLEIPDTLQELFAKYRVLAIGDEKDRVRKEDELNSVEDIHFLVLQNLIQSTLSLSNSQSNSCQSFQIFRLYREFREPVLVRAFMECQKRSLVNRRRVSHSQGPKKNRAVPFVPMSYQLSQSYYKLFTWRFPTTVCTESFQFYDRLRANGILDQPDHFSFKDMDSNDPSSDLVAFSLDSPGGHCVTALALFSLGLLSVDVRIPEQIVVVDSSMVESEVMKSLGKDGGLDDDDEEEDLDEGSGTKRQSVEVKAHQASHTKYLLMRGYYTVPGMVSTRNLNPNDSIVVNSCQVKFRLRNTPAPTHLGPTGPTATPLEELQAGPSCLPASFTSLVDPQLHTRCPEEFAHQMAQSGYSPEDVAASLEILQAVAAADCFGVDREKLSRQFSALEKIADKRTRTFLDYIQDLLEQQQVMEVGGNTVRLVAMASAQPWLLPSVRLKDVEIDTKASGDDSQSRLPAGSSIEDHTSEGAPIPPVSSNGTKKRPYCSIQSPETDAEEATRLPAKKPTLQDVCVAASPRPGTEEQTEAQAQFAAPEDAGAEGPRQESQESVGVSGLEQLGCEFQLPENSEDPRGLTESNMAQVAWESGCERVCFVGRPWRGVDGRLNMPVCKGMMEAVLYHIMSRPGVPESCLLQYYQGVLQPVAVLELLRGLESLGCIQKRMLKKPASVSLFSRPVVEGLGQASEAEALSCQGSTVTFYEPTLDCTIRLGRVFPHDINWKQSGSIYRCVPGQQRSLCPCLIVPPGLSQEPRPSHSCYQSSAQPSTGVATSR

SEQ ID NO: 42 - DNA, 6878 bp, Rattus norvegicus
  Transcription factor IIIC, alpha subunit
gccggggctgctaactgaagaggccatggacgcgctcgagtcgttgttggacgaggtggccctggaggggctcgacggcctgtgcctgcccgcgctgtggagccgcctggaatcccgctcgcctgccttccctttgccgctggaaccctacacgcaggagtttctgtggcgggccttagtcacgcacccgggcatcagtttctacgaggagccgcgagagcgacctgacctgcagctccaagaccgatatgaagaaatcgacttggaaactggaattttggagtccaggagggacccagtcactctggaagatgtctaccccattcatatgatcttagagaataaggatggcatccagggctcctgccgatactttaaggagagaaaggacatcaccagtagcatcaggagcaagtgtttgcagcctcgttgtacaatggtagaagccttcagcaggtggggtaagaagctcatcattgtggcttcccaggacatgcgataccgggccttgataggcctagagggggatcctgatctgaagcttcctgatttctcctactgcattttggagcggttaggtcgatcgagatggcaaggggagctgcaacgagaccttcacaccaccgctttcaaggtcgacgctgggaagcttcattatcacaggaaaattttgaacaagaatgggctcattacaatgcagtcacacgtgatccgactgcctactggagcccagcaacactccatcctcctcctccttaaccggtttcatgtagacaggaggagcaagtacgacatcctcatggagaagctgtctatgatgctgagcacacggagcaaccagatcgagactctgggcaagctgagggaggagctgggactgtgtgaaaggacgttcaagcgtctgtaccagtacatgctgaatgctgggctggccaaagtggtgtcccttcccttgcaggagattcaccctgagtgtggtccctgtaagaccaagaaagggactgatgtcatggttcggtgccttaagctcctgaaggagttcaggcgaaagatggaagacgaccatgacgacgatgacgatgaagaggccatctccaaggctgtacctcccgtggacatcgtgtttgagcgggacatgctcacgcagacctacgagctcattgagcgcagaggaacgaaaggaatttcccaagctgagatccgagttgctatgaatgtgggaaaactggaagcaagaatgctgtgtcggctccttcagaggttcaaggttgtcaagggattcatggaagatgaaggccggcagaggaccaccaagtacatttcctgtgtatttgcggaggagagtgacttgagccgccaatatgcgcgtgaaaaggcccgaggagagctgctaaccactgtgagcctcgcctcagtgcaagatgaatccctcatgcctgagggtgaagaggccttcctctctgactccgaaagtgaggaagagagcagctgcagtggcaagcgtaggggccgagggtcccgggggcattcaagagcctctggggatgctgggcctggctctcggcctcatcactccactccagccaagggcgggtggaaagtcctaaatctgcacccattaaagaagcccaaaagtgccgctgtggaaagatcccgccgaagctctgcttgtagggatggcctggacaccagcagctcatccgagctcaatataccctttgaccctcacagcatggacagtcacagtggtgacatcgctgtgattgaggaggtccggcttgataaccccaaggagggtggtggctcccagaagggcggacggcatggctcaggccaggacaagcctcacaaaacataccgactgctaaagcgcagaaatctgattatagaagctgtcaccaacctccgcctgattgagagcctgttcacgattcagaagatgatcatggaccaggagaagcaagagggtgtctccaccaaatgctgtaagaagtccattatccgcttggtgcggaacctgtctgaggagggtctcttgagattgtataggactacagtcattcaagatggcatcaagaagaaggtagacctggtcgtgcacccttccatggaccagaatgaccctcttgtgagaagtgctattgagcaggttcgcttccggatctccaactcaagcacagcaaacagggttaaagttccaccggccccagcaccccaagaggaagcagaagagggaaaccaagaaccagaggtcccaagtagatcagcagactctgaagcgaacacatcctcgaagccagaaagcacacgggtgaaaaagacagatgagaaaatgggcataaccccactcaagaattacaaacctgtcatagttcctggacttgggcgctccatagggttccttcccaagatgccacgccttcgggtgatgcacctgttcctgtggtacctggtgtatgggcatcctgccagccacactggggaacagcctactttccacagtgagaggaaaacaggcaagcaggagcccagcagaccaggggtccagccctcctcaggagatgactgggactcctctgaagccaaaaacagcacagaaagcagctcctgggaggcagaaatggaactctccacagagagagtgtatgtggatgagatctcatggatgcgctacgtccctcccatccccatccacagagacttcggctttggctgggctcttgtcagtgacattcttctctgccttcccctctccatctttgtccaagttgttcaagtcagctacaaggtggataacctggaggattttctgaatgaccctctgaagaagcacacactgatccgcttcctccctaggcacatccggcagcagctactgtataagaggcggtatattttctcggtggtggagaacctgcaacggctgtgctacatggggctgctacagtttggacccacagagaagtttcaggataaagaccaggtctttgttttcctgaagaagaatgcagtcattgtggacaccaccatctgtgacccacattacaacctggcccacagcagccggccttttgagagacgtctctacgtcttggattccatgcaggatgtggaaagctactggtttgacctgcagtgtatctgcctaaacaccccactaggtgtggtgcgttgtccatgtgcacagaagatctgccctgatccgggcagtgacccagaaggcagcttgcggaaggagcaagagagcgccatggacaagcacaacctagagcgcaagtgtgccatgctggagtataccacggggagccgagaagttgtggatgaaggcttagtccctggggatggactgggagctgctgggctggactctagcttctatgcacacctgaagcgcaactgggtctggaccagctatatcatcaacaaagccagaaagaacaacacctccgaaaatgggctcacaggaagactccagactttcctgtctaagcgcccaatgccacttgggtctggaggcagtggccgtctgcctctctggtcagaggggaaagctgatgctgagctctgtgctgacaaagaggaacactttgaactggaccgagaacctacccctggcaggaaccgaaaagtgcgtgggggcaagagtcagaagcggaagcggctgaagaaggagcccatcaggaagaccaagcgaaggagaagaggagagcatccagaagccaaaagcaaaaaactacgctaccaagatgaggctgaccagaacgccctccggatgatgacccggcttcgggtttcttggtccatgcaggaggatgggttactaatgctctgccgaattgccagcaatgtcctcaacaccaaggtgaaaggaccatttgtcacctggcaggtcgtgcgtgacattttgcatgctacctttgaagagtctttggataaaacatctcactcggttggacgaagagctcgctacatagtcaaaaatccccaggcctttatgaactacaaagtctgcctggcagaagtgtaccaagataaggcactcgttggagatttcatgagtcggaaggataactacgaagacccaaaggtctgtgccaaggagtttaaagaatttgtggagaagctgaaagagaagttcagctctggcctgaggaaccccaaccttgagatcccagacacactgcaggaactctttgccaaataccgggtgttggcaatcggagatgaaaaggaccgtgtcaggaaggaggatgaactgaatagtgtggaggacatccacttcctggtgctacagaacctgatccagagcacactgtccctctctaacagccagtccaactcttgccagtccttccagatcttccgcctctaccgggagttccgggagcctgtgctggtgcgggccttcatggagtgccaaaagaggagcctggtcaaccgacgccgtgtcagccactcccagggtcccaagaagaaccgtgctgtgccctttgtgcccatgtcctaccagctctcccagtcatactacaagcttttcacctggcgatttcccaccaccgtctgcaccgaatccttccagttctatgacagactacgggccaacggcatactagaccagcctgatcatttttctttcaaggacatggatagcaatgacccttcaagtgacctggtggcgttttctttggacagccctggaggacactgtgtgacagccctggccctcttctccttgggcctcctctctgtggatgtccgaatcccagagcagattgtggtggtagacagctccatggtggagagtgaggtcatgaagagcttggggaaagatggcggcttggatgatgatgatgaggaggaagacctggatgaaggttcagggaccaagcgtcagagtgtggaagtaaaggcccatcaggcctcacacaccaagtacctgctgatgagaggttactacacagtgcctggcatggtcagcacgcgcaacctgaaccccaatgacagcattgtggtcaattcctgccaggttaaattccgactgcgcaatacccctgcacccacccatcttgggcccactgggcccacagccacaccgctagaagagctccaggctggcccttcctgcctccctgcctcctttaccagcctggtggatccacagctgcacacccgctgcccagaagagtttgcccaccagatggcacagtctgggtacagccctgaggacgtggctgcgtccctagagatcctgcaggctgtggcagctgctgactgcttcggggttgacagggagaagctgagcagacagttctctgccttggagaagatagcggacaagcgcaccaggacgttcctggactatatccaggacctcttggaacagcaacaagtcatggaagttggaggcaacactgtgcgcctagtggccatggcctctgcccagccctggctcctgccttcagtgcgtctgaaagatgtggaaatagacaccaaggcctcaggggatgacagccaatctagactccctgcggggtcttccatcgaagaccacacctctgagggtgcaccaattcctccagtcagctccaatggcactaaaaagcgcccctactgctctattcagagccctgaaactgatgctgaggaagctacaaggctccctgccaagaagcccacattacaagatgtctgtgtggctgccagtcctaggcctggaacagaagagcagacagaggcccaggctcagtttgcagctcctgaagatgcaggtgcagagggccccaggcaggagagccaagagagtgttggtgtctcaggcctagagcagctgggctgtgagttccagcttccagaaaattctgaagaccccagaggacttacagagagcaacatggcccaggtagcatgggagagcggctgtgaaagagtatgttttgtcggtcgcccatggcgtggtgtggacgggcgcctgaacatgcccgtgtgcaaaggcatgatggaagccgtgctgtaccacatcatgtcaaggcccggtgttcctgagagctgcctgctacagtactaccagggcgtcctacagcctgttgctgtgcttgagctgctccggggcttagagtctctcggctgtatccagaagcggatgctgaagaagccagcgagtgtctcactcttctccaggcctgtggtggagggcctaggtcaggccagtgaggccgaggcactctcctgtcaggggagcactgtcaccttttatgaacctactctggactgtaccatccgtctgggccgtgtcttcccccatgacatcaactggaaacaaagtggatccatttatagatgcgtcccaggccagcagaggagcctctgcccgtgcttaattgttccgcctggactgtcccaagagccccgtccttcacacagctgttaccagagctcggcccagcctagcacaggtgtagcaactagcaggtgacttcagtcccctctgctctcggctgctcttggtcccaggtgcccagccttcctgcagccctgtgtcctgccctggactcaggctctagcatcagcagtatctgcaagggatgttgtttagggagcaggctgatgaccaagccctgagtcacctcacacgcaccacaccattcagactcagaggaagacacatcacaggtgtacctggcagagtctgctcctcttaaggtagggcatcccaacttggcctgaactgagctcaggtctccagctcccaagggcccctcccgccagaagcaaggcctgtaggttttgcttttgtttttgttttattttgcgctcttttcactagatacaagcccctggcatgtatttatttattttttaattaaagtaagatgaaatgc

SEQ ID NO: 43 - protein, 937 aa, Homo sapiens
  Lon protease-like protein
MLAAAGGRVPTAAGAWLLRGQRTCDASPPWALWGRGPAIGGQWRGFWEASSRGGGAFSGGEDASEGGAEEGAGGAGGSAGAGEGPVITALTPMTIPDVFPHLPLIAITRNPVFPRFIKIIEVKNKKLVELLRRKVRLAQPYVGVFLKRDDSNESDVVESLDEIYHTGTFAQIHEMQDLGDKLRMIVMGHRRVHISRQLEVEPEEPEAENKHKPRRKSKRGKKEAEDELSARHPAELAMEPTPELPAEVLMVEVENVVHEDFQVTEEVKALTAEIVKTIRDIIALNPLYRESVLQMMQAGQRVVDNPIYLSDMGAALTGAESHELQDVLEETNIPKRLYKALSLLKKEFELSKLQQRLGREVEEKIKQTHRKYLLQEQLKIIKKELGLEKDDKDAIEEKFRERLKELVVPKHVMDVVDEELSKLGLLDNHSSEFNVTRNYLDWLTSIPWGKYSNENLDLARAQAVLEEDHYGMEDVKKRILEFIAVSQLRGSTQGKILCFYGPPGVGKTSIARSIARALNREYFRFSVGGMTDVAEIKGHRRTYVGAMPGKIIQCLKKTKTENPLILIDEVDKIGRGYQGDPSSALLELLDPEQNANFLDHYLDVPVDLSKVLFICTANVTDTIPEPLRDRMEMINVSGYVAQEKLAIAERYLVPQARALCGLDESKAKLSSDVLTLLIKQYCRESGVRNLQKQVEKVLRKSAYKIVSGEAESVEVTPENLQDFVGKPVFTVERMYDVTPPGVVMGLAWTAMGGSTLFVETSLRRPQDKDAKGDKDGSLEVTGQLGEVMKESARIAYTFARAFLMQHAPANDYLVTSHIHLHVPEGATPKDGPSAGCTIVTALLSLAMGRPVRQNLAMTGEVSLTGKILPVGGIKEKTIAAKRAGVTCIILPAENKKDFYDLAAFITEGLEVHFVEHYREIFDIAFPDEQAEALAVER

SEQ ID NO: 44 - DNA, 3407 bp, Homo sapiens
  Lon protease-like protein
ggcgagcactggctacgtgcgactgtggggagcggcgcggtgctgggtgctgcggcggccgatgctggccgccgccggggggcgggttcccactgcagcaggagcgtggttgctccgaggccagcggacctgcgacgcctctcctccttgggcactgtggggccgaggcccggcaattgggggccaatggcgggggttttgggaagcgagcagccgcggcggaggcgcattctcggggggcgaggacgcctccgagggcggcgcggaggaaggagccggcggcgcggggggcagcgcgggcgccggggaaggcccggtcataacggcgctcacgcccatgacgatccccgatgtgtttccgcacctgccgctcatcgccatcacccgcaacccggtgttcccgcgctttatcaagattatcgaggttaaaaataagaagttggttgagctgctgagaaggaaagttcgtctcgcccagccttatgtcggcgtctttctaaagagagatgacagcaatgagtcggatgtggtcgagagcctggatgaaatctaccacacggggacgtttgcccagatccatgagatgcaggaccttggggacaagctgcgcatgatcgtcatgggacacagaagagtccatatcagcagacagctggaggtggagcccgaggagccggaggcggagaacaagcacaagccccgcaggaagtcaaagcggggcaagaaggaggcggaggacgagctgagcgccaggcacccggcggagctggcgatggagcccacccctgagctcccggctgaggtgctcatggtggaggtagagaacgttgtccacgaggacttccaggtcacggaggaggtgaaagccctgactgcagagatcgtgaagaccatccgggacatcattgccttgaaccctctctacagggagtcagtgctgcagatgatgcaggctggccagcgggtggtggacaaccccatctacctgagcgacatgggcgccgcgctcaccggggccgagtcccatgagctgcaggacgtcctggaagagaccaatattcctaagcggctgtacaaggccctctccctgctgaagaaggaatttgaactgagcaagctgcagcagcgcctggggcgggaggtggaggagaagatcaagcagacccaccgtaagtacctgctgcaggagcagctaaagatcatcaagaaggagctgggcctggagaaggacgacaaggatgccatcgaggagaagttccgggagcgcctgaaggagctcgtggtccccaagcacgtcatggatgttgtggacgaggagctgagcaagctgggcctgctggacaaccactcctcggagttcaatgtcacccgcaactacctagactggctcacgtccatcccttggggcaagtacagcaacgagaacctggacctggcgcgggcacaggcagtgctggaggaagaccactacggcatggaggacgtcaagaaacgcatcctggagttcattgccgttagccagctccgcggctccacccagggcaagatcctctgcttctatggcccccctggcgtgggtaagaccagcattgctcgctccatcgcccgcgccctgaaccgagagtacttccgcttcagcgtcgggggcatgactgacgtggctgagatcaagggccacaggcggacctacgtgggcgccatgcccgggaagatcatccagtgtttgaagaagaccaagacggagaaccccctgatcctcatcgacgaggtggacaagatcggccgaggctaccagggggacccgtcgtcggcactgctggagctgctggacccagagcagaatgccaacttcctggaccactacctggacgtgcccgtggacttgtccaaggtgctgttcatctgcacggccaacgtcacggacaccatccccgagccgctgcgagaccgtatggagatgatcaacgtgtcaggctacgtggcccaggagaagctggccattgcggagcgctacctggtgccccaggctcgcgccctgtgtggcttggatgagagcaaggccaagctgtcatcggacgtgctgacgctgctcatcaagcagtactgccgcgagagcggtgtccgcaacctgcagaagcaagtggagaaggtgttacggaaatcggcctacaagattgtcagcggcgaggccgagtccgtggaggtgacgcccgagaacctgcaggacttcgtggggaagcccgtgttcaccgtggagcgcatgtatgacgtgacaccgcccggcgtggtcatggggctggcctggaccgcaatgggaggctccacgctgtttgtggagacatccctgagacggccacaggacaaggatgccaagggtgacaaggatggcagcctggaggtgacaggccagctgggggaggtgatgaaggagagcgcccgcatagcctacaccttcgccagagccttcctcatgcagcacgcccccgccaatgactacctggtgacctcacacatccacctgcatgtgcccgagggcgccacccccaaggacggcccaagcgcaggctgcaccatcgtcacggccctgctgtccctggccatgggcaggcctgtccggcagaatctggccatgactggcgaagtctccctcacgggcaagatcctgcctgttggtggcatcaaggagaagaccattgcggccaagcgcgcaggggtgacgtgcatcatcctgccagccgagaacaagaaggacttctacgacctggcagccttcatcaccgagggcctggaggtgcacttcgtggaacactaccgggagatcttcgacatcgccttcccggacgagcaggcagaggcgctggccgtggaacggtgacggccaccccgggactgcaggcggcggatgtcaggccctgtctgggccagaactgagcgctgtggggagcgcgcccggacctggcagtggagccaccgagcgagcagctcggtccagtgacccagatcccagggacctcagtcggcttaatcagagtgtggcatagaagctatttaatgattaaagtcatttgcagtgggagttagcatcactaacctgacagttgttgccaggaatttgctttgtttactgctagtatattagaaatcctagatctcagaatcacaatagtaataaacaacaggggtcattttttcctaacttactctgtgttcaggtgtggaatttctgtctcccaagaggaaatgtgacttcactttggtgccaatggacagaaaattctacctgtgctacataggagaagtttggaatgcacttaatagctggtttttacaccttgatttcgaggtggaaagaaattgatcatgaatctctaataaatttaaatctcttaaaccaaaaaaaaaaaaaa

SEQ ID NO: 45 - protein, 359 aa, Rattus norvegicus
  GM3 synthase
MRRPSLLLKDILKCMLVVFGVWLLYILKLNYTAEECDMKKLNYVDPARIKRAHRNTQEVFQKECRPGHAKKTMDLLFKGKYSMDLEPFVQKIPTASEAELKYDPPFGFRKFSSKVQSLLDMLPEHDFPEHLRAKHCKRCVVIGNGGILHGLELGHALNQFDVVIRLNSAPIEGYSEHVGNKTTIRMTYPEGAPLSDAEYYANDLFVAVLFKSVDFKWLQAMVKNESLPFWIRLFFWKQVAEKIPLQPKHFRILNPVIIKETAFDILQYSEPQSRFWGHDKNIPTIGIIAIVLATHLCDEVSLAGFGYDLSQPRTPLHYFDSQCMGAMNWQVMHNVTTETQFLQKLIKEGVVQDLSGGIH

SEQ ID NO: 46 - DNA, 2364 bp, Rattus norvegicus
  GM3 synthase
gcggcacctgcctgccgaggtacgtggcgcagcccccagtcagcagagcggacctcggggaacccaggcagcagcgatccgcctttgcccactcataccccaggcccagcagctcctccccagccctgagacgccggacgcgcctgcgaggggacgccggcggagggtcgcgaccccgggccgcctatatgggcgcccccggcgcagcctgtcgaggtgtgaacgcggtgctgtggcaatgccaaatgagttcacctctgcaaagctgagaagtgattgctcaaggacctccctgcaatggtacacccagacccagcacaagatgagaagacccagcttgttattaaaagacatcctcaagtgcatgttggttgtgtttggagtgtggctcctgtacatcctcaagttaaattacactgctgaagaatgtgacatgaaaaaactgaattatgtagaccctgcccgaataaagagagctcatagaaacactcaggaagtctttcagaaggaatgtcgtcctgggcacgcgaagaaaactatggatctgttatttaagggcaagtacagcatggacttggagcctttcgtgcagaagatccccacagccagtgaagctgagctcaagtatgacccgccttttggattccggaagttctccagtaaagtccagagcctcttggatatgctgcctgagcacgactttcctgaacacttgagagccaagcactgcaagcgctgtgtggttattgggaacgggggcatccttcacggactagagctgggccacgcactcaaccagttcgatgtggtaataaggttaaacagcgcaccaattgagggttattctgaacatgttggaaataaaactactataaggatgacttacccagagggtgctccactgtcggacgctgaatactacgctaatgacttgttcgttgctgttttatttaagagtgttgatttcaaatggcttcaagcaatggtgaaaaatgaaagcctgccattttggattcgtctcttcttttggaagcaggtggcagaaaaaatcccactccagccaaagcatttcaggattttgaacccagttatcatcaaagaaactgccttcgacatccttcagtactcagagcctcagtcaagattctggggccatgataagaatatccccacgatcggcatcattgccattgtcttggccacgcatctgtgtgatgaagttagcctggcaggctttggatatgacctcagtcaaccaaggacccctctgcactactttgacagtcagtgcatgggcgccatgaactggcaagtcatgcacaacgtgaccacagagacccagttcctccagaagctcatcaaggagggcgtggtgcaggacctcagcgggggcatccactgagaactttgaacaccgcagacctcacttagcaatgcagctgagagctgtggtgagcagcctccccagggagtttaccctgcagctgctttggcctacagctagtgtttttaaactcagttttaaaagaaaaggaaagaacaacagcaacaacaaaagttcagccctttacacctctttgtcctatttatttgaagtcagtgttgggttttgcacaattttgtaagttaattttaagaatggggatggaaagacttttcaaagagaatcgtatggtttattgtattttaaagaagtaatttaatttgcaaaaactgtacacatgtactctccccaggtgttgaggtgggaggagaggggcttctgcaccttcgatgatggcctcgatacctgactgcgggttctgcagctctgtttggtagcactgctggcagggaaacttcctgcctcctggatgaaggaagggtttactcatcatcactggcagctgcaggaagtcgggggcctgataaacaagttcataacccctttctgctagtccgtctgccagaagactcagaggacccaagcagggcagctgttccacaggcgagccactgtcagctgagtaccgtgatgctgccccaggatgggagaagccatgtcgtcctacactgtcagggcacttttcagcttctggagaagtgtctgttctctctgccctcccaaagcacttggtgttatttaaggcgtgaggctgtctgtctgagatggttcatcagaattgtgacagccatggggagcaagacctctgcagatgaccacattgctaaagcactggagtgaaccccccctgttgtaacttaagacccatcctgaagtgccctgaagtgcccaccaaccaatgtgaaaggagaatgaggaaggggagggaaaagaacagaaagaaagaaagaaaaataataaaagcttttgaggagcccctg

SEQ ID NO: 47 - protein, 434 aa, Rattus norvegicus
  Neuron-specific enolase
MSIQKIWAREILDSRGNPTVEVDLHTAKGLFRAAVPSGASTGIYEALELRDGDKQRYLGKGVLKAVDHINSTIAPALISSGLSVVEQEKLDNLMLELDGTENKSKFGANAILGVSLAVCKAGAAEKDLPLYRHIAQLAGNSDLILPVPAFNVINGGSHAGNKLAMQEFMILPVGAESFRDAMRLGAEVYHTLKGVIKDKYGKDATNVGDEGGFAPNILENSEALELVKEAIDKAGYTEKMVIGMDVAASEFYRDGKYDLDFKSPADPSRCITGDQLGALYQDFVRNYPVVSIEDPFDQDDWAAWSKFTANVGIQIVGDDLTVTNPKRIERAVEEKACNCLLLKVNQIGSVTEAIQACKLAQENGWGVMVSHRSGETEDTFIADLVVGLCTGQIKTGAPCRSERLAKYNQLMRIEEELGEEARFAGHNFRNPSVL

SEQ ID NO: 48 - DNA, 2218 bp, Rattus norvegicus
  Neuron-specific enolase
cgccgccgccgtcaccaccgccaccgccaccggctgagtctgcagtcctcgaggagatcccagccatcatgtctatacagaagatctgggcccgagagatcttggactcccgtgggaatcccaccgtggaggtggatctccatactgccaaaggtcttttccgggctgcagtccccagtggggcctccactggcatctatgaggccctggagctaagggatggggacaaacagcgttacttaggcaaaggtgtcctgaaggctgtggaccacatcaacagcaccatcgcaccggccctcatcagctcaggcctctctgtggtggagcaggagaagctggacaacctgatgctggagttggatgggactgagaacaaatccaagtttggggccaatgccatcctgggtgtgtccctggccgtgtgcaaggctggggcagccgagaaggacttgcccctctatcgccacattgctcaactggctgggaactccgacctcatcctgcccgtgccggcctttaatgtgatcaacggtggctctcatgctgggaacaagttggccatgcaggagttcatgatcctcccagtgggtgctgagagctttcgggatgccatgcgacttggggccgaggtgtaccacacactcaagggggtcatcaaggacaagtacggcaaggatgccactaatgtgggggatgaaggcggctttgcccccaatatcctggagaacagcgaagctttggagctggtgaaggaagccattgacaaggctggctacacggaaaagatggtgattggtatggatgtggctgcctctgagttttaccgcgatggcaaatacgacttggatttcaagtctcctgctgacccttcccgatgcatcactggggaccagcttggggcactctaccaggactttgtccggaactatcctgtggtctccattgaagacccattcgaccaggatgactgggcagcttggtccaagttcacagccaatgtcggcatccagatagtgggtgatgacctgacggtgaccaaccccaagcgcatcgagcgggcagtggaggagaaggcctgcaactgtttgctgctcaaggtcaaccagatcggctcagtcacagaagccatccaagcgtgcaagctggcccaggagaacggctggggggttatggtgagtcatcgctctggagaaaccgaggacacgttcattgcagacctcgtagtgggactgtgtacaggtcagatcaagactggtgccccatgcagatctgaacgtctggcgaagtacaaccagctcatgaggattgaagaggagttgggggaggaggctcgcttcgcgggacacaacttccggaatcccagtgtgctgtgaccccctgcttgcctgaacaccggaacatcatctcattctcctggagcctctttcttgctgtcccgacccgccatagttaccttgataccttgagccccaagtcacccagaacacctcgactcacctgctctggctgttcttggcttccacaaccccttgctgtctcctactcttcctcctctctgggccccatttttggggggattccagtctgcccactttcccttctattctctctaatcttaaaaaaaaaaaaaaaatgacgactagaagaagcggtccacagaagaaccgccagcgtccgagaggagcttcaggattggtgtgttggggcgtttaaagtggggccacgtggcacgtgtgcttccctgccatccatggtgtgttaagccttgaactatgcacagagctggtgtttggggagtgctggatgtgtgtgtgttcacatttgtttgtttgtttatttatttattcacttatttatttctcagcctgtcagtcgtctgccattactcttacagtctgaaagcatcagtattttcacgtggttccatttcaagatgacctaggatgggaggttttgttagcatgggaaaggtcacagaaaggttagcaatggtttttcatttggtgcactaactgaagctcggtactttacagaatggggctgtgtacccggggacttttctcctataactctctcccccagccctaggttcctcagtctttttctccggctgcaccagagcgctgcctcattcccccgtgccatgtcccacagttgccactgtctctgtggctttgaaatgaccaccactattaaagtctgaaccacagtgcacacc

SEQ ID NO: 49 - protein, 337 aa, Mus musculus
  CA XIV
MLFFALLLKVTWILAADGGHHWTYEGPHGQDHWPTSYPECGGDAQSPINIQTDSVIFDPDLPAVQPHGYDQLGTEPLDLHNNGHTVQLSLPPTLHLGGLPRKYTAAQLHLHWGQRGSLEGSEHQINSEATAAELHVVHYDSQSYSSLSEAAQKPQGLAVLGILIEVGETENPAYDHILSRLHEIRYKDQKTSVPPFSVRELFPQQLEQFFRYNGSLTTPPCYQSVLWTVFNRRAQISMGQLEKLQETLSSTEEDPSEPLVQNYRVPQPLNQRTIFASFIQAGPLYTTGEMLGLGVGILAGCLCLLLAVYFIAQKIRKKRLGNRKSVVFTSARATTEA

SEQ ID NO: 50 - DNA, 1624 bp, Mus musculus
  CA XIV
tggccagtaagtggtgtggagattacgaagggacatacggagagggcagagagaggaagagagagaaagtgagagaggaagaaatttatcctgggatccagaagttcgtgttaacctgtggaaaatcaagtccctggaagtctgcagagacagagacaagaagaaaagagatagaacgccagaaactcctctctctccctccctctccacctctctcttctaaaccccaaattcctggtcccttgtaccccattgtggggataatatgttgttcttcgctctcctgttaaaggtgacttggatcctggctgcagatgggggtcaccactggacatatgaaggcccacacggtcaggaccattggccaacctcttatcctgagtgtggaggcgatgcccagtcccccatcaatatccagacagacagtgtgatatttgaccccgatctgcctgctgtacagccccatggatatgaccagcttgggactgagcctttggatctacacaataatggccatacagtgcagctttccctgcccccaaccctgcacctgggtggactgccccgaaaatacacagcagcccagctccacctgcactggggtcagagaggatccctcgagggatcagagcaccagatcaacagtgaagccacggctgcggagctccacgtggttcactatgactcccagtcctacagcagcttgagtgaggcagctcagaagccacagggcctggctgtcctaggcatcctcattgaggtgggcgagactgagaatccagcttatgatcacattctgagtcgtctacatgaaataagatacaaagatcagaagacctctgtgcctcccttcagcgtgagagagctgttcccccaacagctggagcaattcttccgctacaacggctcactcacaactcccccctgctaccagagtgtgctctggacagtcttcaacagaagggcccagatttcaatgggacagttagagaagctccaggagacattgtcctctacagaagaggacccctctgagccccttgtacagaactacagagtcccccagcctctcaaccagaggaccatctttgcttctttcatccaagcaggaccactgtataccacaggagagatgctgggtctaggtgtgggaatcttggctggatgtctttgccttctgctggctgtttatttcatcgctcaaaaaattaggaagaagcggctgggaaacaggaaaagtgtggttttcacctctgctcgggctaccacagaggcgtgaactctgtctcaagatgctgcagatgcctccctctcctcctgccagggagcctctctgagggctgcaggcactggacgaccagttgtaggcaggcacgtgtcctgctaggtaaccctctctatacaccagggaccccagctcttcaggaagggctgagcctttggccttcaaagctgtggatgaggagattccctgtcctcatgcttggttggaagaagctgaggataaacttccatctttcacctcacaccgccatgttctctcccttagaaaaacgttgtagttttttttttcctctaggaaaaaagggctgctgctgggattttaattattttttgctcaata

SEQ ID NO: 51 - protein, 334 aa, Rattus norvegicus
  Cytosolic malate dehydrogenase
MSEPIRVLVTGAAGQIAYSLLYSIGNGSVFGKDQPIILVLLDITPMMGVLDGVLMELQDCALPLLQDVIATDKEEVAFKDLDVAVLVGSMPRREGMERKDLLKANVKIFKSQGAALEKYAKKSVKVIVVGNPANTNCLTASKSAPSIPKENFSCLTRLDHNRAKSQIALKLGVTADDVKNVIIWGNHSSTQYPDVNHAKVKLQGKEVGVYEALKDDSWLKGEFITTVQQRGAAVIKARKLSSAMSAAKAISDHIRDIWFGTPEGEFVSMGVISDGNSYGVPDDLLYSFPVVIKNKTWKFVEGLPINDFSREKMDLTAKELTEEKETAFEFLSSA

SEQ ID NO: 52 - DNA, 1266 bp, Rattus norvegicus
  Cytosolic malate dehydrogenase
ctttgctggtgcagagatcggccttgcagtttgcaataatgtctgagccaatcagagtcctcgtgacaggagcagccggtcagattgcatattcgctgctgtacagcattggaaatggatctgtctttgggaaagaccagcccatcattcttgtgctgttggacatcacccccatgatgggtgttctggacggtgtcctgatggagctgcaagactgtgcccttccccttctgcaggatgtcattgcaacagacaaagaagaggttgccttcaaagacctggacgtggctgtccttgtgggctccatgccaagaagggagggcatggagaggaaggacctactgaaagccaacgtgaagatcttcaaatcccagggcgcagccttggagaagtacgccaagaaatcagttaaggtcattgttgtggggaacccagccaatacaaactgcctgacggcctccaagtcagcaccatcgatccccaaggagaacttcagttgcctgactcgattggaccacaaccgagcaaaatctcaaattgctcttaaactcggtgtaaccgctgatgatgtaaaaaatgtcattatctggggaaatcattcatcaacccagtatccagatgtcaatcatgccaaggtgaaattgcaaggaaaagaagttggtgtgtatgaagccctcaaagacgacagctggctcaagggagagttcatcacgactgtgcagcagcgtggtgctgctgtcatcaaggctcggaagctgtccagtgccatgtctgctgcgaaggccatctcggaccacatcagagacatctggtttggaaccccggagggcgagttcgtgtcgatgggcgtaatctctgatggcaactcctatggtgtccctgatgacctgctctactcgttccctgtcgtgatcaagaataagacctggaagtttgttgaaggcctccccattaacgacttctcccgtgagaagatggacctgacagcaaaggagctgaccgaggaaaaggaaacggcttttgagtttctctcctccgcatgactacacagtcgtgttgacgtcagcagacatcccaaggctgaggaatcaaaatgtcgtctttgagcctagtaccaaacagtaataatggtacattcagattgtgaacagcaaaatattttaaatattatgtgctttgtgattcgtgaaagtctatcacgttgttagtgctgcgatctaaataaaagtatattcaagtgaaaaaaaaaaaaaaaaaaaaaaaaaa

SEQ ID NO: 53 - protein, 199 aa, Rattus norvegicus
  HBP23
MSSGNAKIGHPAPSFKATAVMPDGQFKDISLSDYKGKYVVFFFYPLDFTFVCPTEIIAFSDRAEEFKKLNCQVIGASVDSHFCHLAWINTPKKQGGLGPMNIPLVSDPKRTIAQDYGVLKADEGISFRGLFIIDDKGILRQITINDLPVGRSVDEILRLVQAFQFTDKHGEVCPAGWKPGSDTIKPDVNKSKEYFSKQK

SEQ ID NO: 54 - DNA, 882 bp, Rattus norvegicus
  HBP23
ggctcacggttggttctgtttgtgagacctgtagctcgactctgctgatagcaagatgtcttcaggaaatgcaaaaattgggcatcctgctcccagcttcaaagccacggctgttatgccggatggacaattcaaagatatcagcctaagtgattacaaaggaaaatatgttgtattctttttttaccctcttgactttacttttgtgtgtcccacggagatcattgctttcagtgatagagcagaagaatttaagaaactcaactgccaagtgattggagcttctgtggattctcacttctgtcatctggcatggattaacacacccaagaaacaaggaggattgggacccatgaacattcccttggtatcagatcccaagcgcaccattgctcaggattatggagtcttaaaagctgatgaaggtatctctttcaggggcctctttattattgatgataaaggtatccttcgccagataacaataaatgatcttcctgttggccgctctgtggatgagattctgagactagtccaggccttccagttcactgacaaacatggtgaagtgtgcccagctggctggaaacctggcagtgataccatcaagcctgatgtcaataagagtaaagagtatttctctaagcagaagtgagcactggaccagttttctggcagacagctttgagcagccagaagaaatttgtactctacacatgacgtggtgtgattccagataagcctttcctacaagggctaggggtggttagcctttcttccactattggtaaggggcagaccatcttatatcagtcacagaaaccaacctgttaattctctctctctcttttttttttttaagtatctattaaacgtgaattc

SEQ ID NO: 55 - protein, 573 aa, Rattus norvegicus
  Squalene epoxidase
MWTFLGIATFTYFYKKCGDVTLANKELLLCVLVFLSLGLVLSYRCRHRNGGLLGRHQSGSQFAAFSDILSALPLIGFFWAKSPPESEKKEQLESKRRRKEVNLSETTLTGAATSVSTSSVTDPEVIIIGSGVLGSALATVLSRDGRTVTVIERDLKEPDRILGECLQPGGYRVLRELGLGDTVESLNAHHIHGYVIHDCESRSEVQIPYPVSENNQVQSGVAFHHGKFIMSLRKAAMAEPNVKFIEGVVLRLLEEDDAVIGVQYKDKETGDTKELHAPLTVVADGLFSKFRKNLISNKVSVSSHFVGFIMKDAPQFKANFAELVLVDPSPVLIYQISPSETRVLVDIRGELPRNLREYMTEQIYPQIPDHLKESFLEACQNARLRTMPASFLPPSSVNKRGVLLLGDAYNLRHPLTGGGMTVALKDIKIWRQLLKDIPDLYDDAAIFQAKKSFFWSRKRSHSFVVNVLAQALYELFSATDDSLRQLRKACFLYFKLGGECLTGPVGLLSILSPDPLLLIRHFFSVAVYATYFCFKSEPWATKPRALFSSGAILYKACSIIFPLIYSEMKYLVH

SEQ ID NO: 56 - DNA, 2199 bp, Rattus norvegicus
  Squalene epoxidase
ccggaaggagttcggcaggtctcccggaccccctttgtgaactacattttgggtagaacattttaatcaccgaaacccttctgaggaaaaaaagactcccactgccccctgcaaaaaaacaaaagcaaaaacaaaaaaaccaaaccccaaacccccaaatctcagtcttagctggtgccaccaaagaagcttttgagccatgtggacttttcttggaattgctactttcacctatttttataagaaatgcggggatgtcaccctggccaacaaggagctcctgctgtgcgtactggtgttcctgtcgctgggcctggtgctctcctaccgctgtcgccatcgaaacgggggcctccttggccgccatcagagcggctcccagttcgctgccttctcagatattctctctgctttgcctcttattggcttcttctgggccaaatcaccccctgaatcagaaaagaaagaacagctggagtccaagaggcgcagaaaagaagtcaatctgtcagagacgacgttaacgggagcagctacctcagtatcgacatcatctgtgacggacccagaagtgatcatcatagggtctggtgtacttggctctgctttggcaacagtactctctagagatggaagaacggtgacagtaatcgagagagatttaaaagagcctgacagaatacttggagagtgtctgcagcccggtggctatcgagttcttcgagagctgggccttggagatacagtagaaagtcttaatgcccatcatatacacggctacgtaattcatgactgtgaaagcaggtctgaagttcaaattccatacccggtgtcagaaaacaaccaagtacagagtggggttgctttccaccatggcaagttcatcatgagtctccggaaagcagctatggcagagcccaatgtaaagtttatagaaggtgttgtgcttcggttactagaggaagatgatgctgtgattggtgtgcaatacaaggacaaggagactggggacaccaaggagctccatgccccgctcactgttgttgccgacgggctcttctccaagttcaggaagaacctcatctccaataaagtctctgtttcctcccacttcgttggcttcattatgaaggatgcaccacagtttaaagccaatttcgcggagcttgttctggtcgatcccagtccagttctcatctaccagatttcacccagcgaaactagggtgcttgtcgatattcgaggagaattgccaagaaacttaagagaatacatgacagaacaaatttacccacagatacctgatcacttgaaggaatcatttctggaggcctgtcagaatgctcgtctgcggaccatgccagcaagcttccttcctccttcctcagtgaacaaacgaggcgtcctacttctgggagatgcgtataacctgaggcatcctcttactggtggaggaatgacagtcgctttaaaagatataaaaatatggagacaactgttaaaagatattcctgacctttatgatgatgccgctattttccaggccaaaaagtcattcttttggtcaagaaaaaggagccattcctttgttgtgaacgtgctggctcaggcgttgtatgaactattttctgctacagatgattccttgcgtcagctccgaaaagcttgctttctttattttaaacttggtggagaatgtttgactggtcctgttgggttgctttctatattgtctcctgaccctctcctattgattcgacacttcttctccgttgcagtctatgccacgtatttctgcttcaagtcagagccatgggctacaaaacctcgggctcttttcagtagtggtgctatactgtacaaagcgtgctctataatatttcctctcatctattcagaaatgaagtatctggttcactgaaagggaaaccacatggaagtcattgggacttgaggaggatgtacatagcctaggactgtgtgtgtgacttctgcagtggtgactcaaggaccaagcttgtgtataagcatgtaaatatatgccttaattcacaattgagaatgaagggtcaataagctagatgtttaaaagaatgattgtttccacaaattaatgttaacactcaagtgtttggatttcagtattggggtgattcaattggggacaatgccaaataaaatgaaggagtggaactcctt

SEQ ID NO: 57 - protein, 152 aa, Rattus norvegicus
  Copper-zinc containing superoxide dismutase
MKAVCVLKGDGPVQGVIHFEQKASGEPVVVSGQITGLTEGEHGFHVHQYGDNTQGCTTAGPHFNPHSKKHGGPADEERHVGDLGNVAAGKDGVANVSIEDRVISLSGEHSIIGRTMVVHEKQDDLGKGGNEESTKTGNAGSRLACGVIGIAQ

SEQ ID NO: 58 - DNA, 523 bp, Rattus norvegicus
  Copper-zinc containing superoxide dismutase
cgatgaaggccgtgtgcgtgctgaagggcgacggtccggtgcagggcgtcattcacttcgagcagaaggcaagcggtgaaccagttgtggtgtcaggacagattacaggattaactgaaggcgagcatgggttccatgtccatcaatatggggacaatacacaaggctgtaccactgcaggacctcattttaatcctcactctaagaaacatggcggtccagcggatgaagagaggcatgttggagacctgggcaatgtggctgctggaaaggacggtgtggccaatgtgtccattgaagatcgtgtgatctcactctcaggagagcattccatcattggccgtactatggtggtccacgagaaacaagatgacttgggcaaaggtggaaatgaagaaagtacaaagactggaaatgctggaagccgcttggcttgtggtgtgattgggattgcccaataaacgttccctatgtggtctgagtctcagacggcatctgctgcctgctaaactgtaaaaaaaaa

SEQ ID NO: 59 - protein, 413 aa, Rattus norvegicus
  Aspartate aminotransferase
MAPPSFFAQVPQAPPVLVFKLIADFRDDPDPRKVNLGVGAYRTDDSQPWVLPVVTKVEQKIANDHSLNHEYLPILGLAEFRSCASQLVLGDNSPALRENGVGGVQSLGATGALRIGADFLARWYNGTDNKNTPVYVSSPTWENHNGVFSAAGFKDIRSYRYWDAEKRGLDLQGFLNDLENAPEFSIFVLHACAHNPTGTDPTEEEWKQIAAVMKRRFLFPFFDSAYQGFASGDLEKDAWAIRYFVSEGFELFCPQSFSKNFGLYNERVGNLTVVGKEHDSVLRVLSQMEKIVRITWSNPPAQGARIVATTLSNPELFKEWKGNVKTMADRILTMRSELRARLEALKTPGTWSHITEQIGMFSFTGLNPKQVEYLVNEKHIYLMPSGRINMCGLTTKNLDYVATSINEAVTKFQ

SEQ ID NO: 60 - DNA, 1937 bp, Rattus norvegicus
  Aspartate aminotransferase
ccgacgtcccctcagattccatcgcgatggcccctccatcattctttgcccaggttccacaggccccgccggttctggtctttaagctcattgcggacttccgggatgatcccgatccccgcaaggttaacctcggcgtgggagcgtaccgcacagatgactctcagccctgggttttgccagtagtgacgaaggtcgaacagaagattgctaacgaccacagtctcaaccacgagtacttgcccatcctgggcctggcggagttccggagctgtgcttctcagctagtacttggggacaacagcccagctctcagggagaatggggttgggggtgtgcagtctttgggagcgaccggtgcacttcgaattggagctgacttcttagcgcgatggtacaatggcacagacaacaagaacacgcccgtctacgtatcatcgccgacctgggagaaccataatggcgtgttttctgccgctggttttaaagacattcggtcctatcgctactgggatgcagagaagagaggacttgatctccagggtttcctgaatgatctggagaatgctcctgagttctccatctttgtcctccacgcctgtgcacacaacccaacggggaccgacccaactgaagaggagtggaagcagatcgccgccgtcatgaagcgccgttttctgttccccttctttgactcagcctatcagggctttgcatctggagacctagagaaagatgcctgggctattcgctattttgtgtctgaaggcttcgagctcttctgtccccagtccttctccaagaacttcgggctctacaatgagagagtggggaatctgaccgtggtcggaaaagagcatgacagcgtcctgcgggtcctttcccagatggagaagattgtacgaatcacctggtccaatccccctgcccagggagctcggatcgtggccaccaccctctccaaccctgagctctttaaggagtggaaaggaaacgtgaagacaatggctgaccggattctgaccatgagatccgaactcagggcgcgactagaagctctcaagactcccgggacttggtctcacatcactgagcagattggaatgttcagctttactgggttgaaccccaagcaggtcgagtatttggtcaacgagaagcacatctatctgatgccgagcggtcggatcaacatgtgcggcttgaccaccaagaacctagattatgtggctacctccatcaatgaagctgtcaccaaattccagtgaagaaacaccgagtagttcataccccaaagcagttcctgtcacagctttcctgcctgcgcaaacctagccgtacatgttgtttattagagatgaccaccatggggaggcagccgctgtttagctggccccacaagagaagacatttcttgaaatgaacctgggtcgggtggggggatgactggggttagggccttttggaaaccagagcagattaaagttatttaagaataaaaaaaccctttgatatgagatgtaatcatcttgccttcctctgtagtattctgcaggagtgttgcccacgaagccgtgggcttctgcacgttgcttgagtctgtacagagtcctgtccccaaaatcaagttgtctgaggagccggctgtgactgtggatgttggcattaaaactcaccatttccatcgtctctgtctctcggccccctgatctttccgcatggttgtgaccctggtcttggaacattagttttttaaggccactgtggccagtatttatatcatgacacacaagtggatttacatatttaactgagatgaaagttccgctaaacggtatttgctcttgtgatacgtggcacattgtgacattttcttagtctcttctgtcgtgttctgtttcatttaaaaaaataaaaatgctgatcaagacaaacgg

SEQ ID NO: 61 - protein, 362 aa, Rattus norvegicus
  Cytosolic branch chain aminotransferase
FRAKDLIITKADVLKKKPDPSSLVFGASFTDHMLMVEWTSKYGWDKPHTKPFENLSIHPAASVLHYAVELFEGLKAFREVDNKIRLFRPDLNMKRMCRSAVRTTLPEFDKEELLQCVLQLIQLDREWVPYSTSASLYIRPTFIGIEPSLGVKKPSKALLFVILSPVGSYFSNGTFSPVSLWANPKFVKSWKGGTGDFKMGCNYGSSLLAQCEAAENGCHQVLWLYGKENRITEVGTMNLFLYWINKDGEEELATPPLDGVILPGVTRQSILELGEEWGEFKVCDRHITMDGLSTALEENRVKEMFGSGTACVVCPVASILYKGQMLHIPTMENGHKLSSRIMAKLTDIQYGRIKSEWTLELP

SEQ ID NO: 62 - DNA, 2228 bp, Rattus norvegicus
  Cytosolic branch chain aminotransferase
tttagggccaaagatctcattatcacaaaagccgatgtcttaaaaaagaagcccgaccccagctcgctggtctttggagcttcgttcactgaccacatgctgatggtggagtggacctccaagtatggatgggataagcctcacaccaagccttttgaaaacttgtccatacatcccgctgcctctgttttgcactatgctgtggaactgtttgaaggcttgaaggcttttcgggaagttgataacaagatccgattgttccggccggacctcaacatgaaaagaatgtgccgatctgccgtgaggaccactctgccggagtttgacaaggaggagcttctgcaatgcgttcttcagctcatacagctcgaccgagagtgggtcccctactcaacctctgccagtctgtacatccgccccacattcatcgggattgagccatcgcttggagtcaagaagccttctaaagctctgctctttgtgattttgagccccgtgggatcttatttttctaatgggaccttttctccggtgtccctgtgggccaacccaaagttcgtcaaatcctggaaaggtgggactggagacttcaagatgggctgcaactatggatcttcccttctggcgcagtgtgaggcggcagagaatggctgtcaccaggtcctgtggctgtacggcaaggaaaaccggataactgaagtgggcacgatgaatctcttcctctactggataaacaaagatggagaagaagaactggcgacgcctccgctagatggcgtcattctcccaggagtcactcggcagagcatcctggagctgggagaagagtggggcgagtttaaggtgtgcgacagacacatcaccatggatggcctgtccaccgccctggaggagaacagagtgaaggagatgttcggctcggggacagcctgcgttgtctgcccagttgccagtattctgtacaagggccagatgctgcacattccaaccatggagaatggccacaagctttcaagtcgcatcatggcaaagttgactgatatccagtatggacggatcaagagcgaatggacactggagttgccctaatgggagagctcagggtatcggtgacggggtgccacagaagaccgactcctgtcctcgagctgggacaacctgtgactactttaactccttgtagttccattgttcattgttaccaaacgagtttgtgtccccccccccccgtgagccaagaaaattgccagtgttaagtgtcacctgtgaacatgatagtagctgctttactgtacctttccttggaaagctatcaatgaataattgcctcccctcactccataccaatccttagtaggagaatggttcccccaccaatgagatgactgtgtgctggaagggctactgaggaaatgccataggcggcctccctgtgactcatgggcaccctcagagcgggagccctttgttacttttgctggcccttgtacttgttctgttgtttacgtttttgtttgtttgttgtctaattggggaagatttgggctccctgtgaagccctgctggcctggtattccgtgatgtctgcccaggctggtctcagactcggagcgggtcttcctttctcacacagccttctggatgctggggcgatggacaggtgtgataccttgatttgtttctgtcttttaaacaaaagtttggtcggctggatttcgtttctccgcgcttctgtaagtccctgagtccgcgctaaggtggccgtgcacccttcttggtatcatggcctgcactaatgtcaccgaaggtgtctgtgaggctcactgccctttttctgtaactatacctggctgctcactgcgctgctatgagactaggggtcctgtgccttctagatctttgtatcctcaaagcccagcacatagtaagtattcagtacttgtttaccatgagaatgaacatagaagtgtactttctgtctctccatgctgaaaccctttcggaaaccacgcctgattcgggcagcatgtagcagtatttatcttaggctgtctttcttgtccctggactcctccagacagcatggaggaattctgttttaagattatcttggagtttaagtgattgccctggaaaaatgaaatgtaccaaccatgtggagatgacagctactgtacattatgtatgaaatgccaaataaagggacaagttgggagataaaaaaaaaa

SEQ ID NO: 63 - protein, 442 aa, Rattus norvegicus
  Dihydrolipoamide succinyltransferase
MRSLSAFQKGNCPLGRRSLPGVSLCQGPGYPDSRKMVINTVAVFSVRFFQTTAVCKNDVITVQTPAFAESVTEGDVRWEKAVGDAVAEDEVVCEIETDKTSVQVPSPANGIIEALLVPDGGKVEGGTPLFTLRKTGAAPAKAKPAEAPATAHKAAPEAPAAPPPPVAPVPTQMPPVPSPSQPPSSKPVSAIKPTAAPPLAEAGAAKGLRSEHREKMNRMRQRIAQRLKEAQNTCAMLTTFNEVDMSNIQEMRARHKDAFLKKHNLKLGLMSAFVKASAFALQEQPVVNAVIDDATKEVVYRDYIDISVAVATPRGLVVPVIRNVETMNYADIERTINELGEKARKNELAIEDMDGGTFTISNGGVFGSLFGTPIINPPQSAILGMHGIFDRPVAVGGKVEVRPMMYVALTYDHRLIDGREAVTFLRKIKAAVEDPAVLLLDL

SEQ ID NO: 64 - DNA, 2749 bp, Rattus norvegicus
  Dihydrolipoamide succinyltransferase
tcccggtcccgctgcgtgtcccgggcgttcatgcgctcgctttctgccttccagaaggggaactgccctctagggagacgttccctgcctggggtctccttatgtcagggaccaggttaccctgacagcaggaagatggtcattaacacagtagccgtcttcagtgttcgcttcttccaaaccacggcagtgtgcaagaatgatgtgattacagtccagaccccagcgtttgcagagtctgtcacagagggagatgtcaggtgggagaaagctgttggagatgcagttgcagaagatgaagtggtgtgtgagattgagacagacaagacttctgtgcaggttccatcaccagcaaatggcatcattgaagctcttttggtacccgatgggggcaaagttgaaggaggaactcctctattcacactcaggaaaaccggtgctgctcctgctaaggccaaaccagctgaagcccctgctacagcccacaaagcagcgcctgaagcaccggcggcccctcctcctcctgtagcaccagtgcccactcagatgccacctgtgccctcaccctcacaacctccttctagcaaaccagtgtctgcaataaaacccactgctgcccctccactggctgaggcgggagctgctaaaggcctgcgctcagaacatcgggaaaagatgaacaggatgcggcagcgcatcgcccagcgtctgaaggaagcccagaacacctgcgcaatgctgacgacgttcaatgaggttgacatgagtaacatacaagagatgagagctcggcacaaagatgctttcctgaaaaaacataacctgaaattaggcctcatgtcggcatttgtgaaggcctcagcattcgccttgcaggagcagcctgtagtaaacgcagtgattgatgacgcaaccaaggaggtggtgtacagagattatattgacatcagtgtcgcagttgctaccccaaggggtctcgtggttcctgtcatcaggaatgtggaaactatgaattatgcagatattgaacggaccattaatgaactaggagagaaggcccggaagaatgaacttgccatcgaagacatggatgggggcaccttcaccatcagcaatggaggagttttcggctcacttttcggaacacccattatcaacccgcctcagtctgccattctgggcatgcatggcatcttcgacaggcctgtggctgtggggggcaaggtggaagtccgacctatgatgtatgtagccctgacctacgaccaccggctgattgatggcagagaggctgtgactttcctccgaaaaatcaaggcagcagtagaagatccagcagtcctcctcctagacctttaggaggaagccacacatgcctacctactgatcatgcaggaatgaaaaaccagtcttctagcccgtgcaacctcctcagtccaggttaactgagggcaggcaggcactaccattggcctcgagcaaggactccagggcactacgtaaccaggcctagggcatcagtcctttcatgggtctttttatgctccttctggctcttcctctctcctgtgctcttccttctgctctcttggcctgacagagagagagagagagagagagagagagagagagagagagagagagagagcctgtgaatgcccatcaatagtcctgcctttattccagtcctctacaaagacacctttgcttctctccagtaacagtatgctatagggaataccaccagggaccatgtgattgagtttcttgtctttggaaagtgttctcccaaagatgcctagggggaagctttgctccggggctcaaagcagcctgtgtcgcagctgttcttggtctcacttgatgccccctgtgtgggtattgaagataggcaaagcggggctacctcatcctaacctgtcagcggcttcaaggtgcctctctacctctgacaggagcacaggctggaggatttagggataggcacaattgtgctgggtccctgaggctacctgtgtagtgcacagatgggagtgaaacttggcttgccctttacagggctccattgtatgctggcactgggaagattcatgttgtcataactacgtacaactgttgtccatcataccaaccctttccagcttctaggaatcattctaggacggtgttctcacgtaaagcagattttagcatatcatggcagtgggacacctggtgaacggactgttctcaccagatcaggctgatgagaccttttaaattcaaggtggtacgagcatgtgctggggtagggcctgttctctcccaacctgggatgtggcctgtggggagcaaggccttggttcctctggtgttggacacagataaggggaggatggactgtggcgggaaccagcctcaggagttaggagagtgaagagataatgacgtcatcgctacactcacccttcaggggataggtggtagttagaatatttttgaagcatggtgaaatgtaattaactggttatgaaagctcctagcccttgtgtccttcactgagcctgagactgctgacagctgacatggggccattagtgctgaatgcccttttttcttgtaatccaagacttcctgggggaagaggggaagaggtcagtattgagtgcctgcaacatctgctacgtatagctataccattcagaacttgtaatgaaaatatttaaagagactgattttgaatgaaaattaaagggcaaatgttctcaaa

SEQ ID NO: 65 - protein, 127 aa, Rattus norvegicus
  RNA polymerase II
MSDNEDNFDGDDFDDVEEDEGLDDLENAEEEGQENVEILPSGERPQANQKRITTPYMTKYERARVLGTRALQIAMCAPVMVELEGETDPLLIAMKELKARKIPIIIRRYLPDGSYEDWGVDELIISD

SEQ ID NO: 66 - DNA, 470 bp, Rattus norvegicus
  RNA polymerase II
tttctctgctctgcgacccggaccggccagtaaggagaaggtatcatgtcagacaacgaagacaatttcgatggcgatgactttgatgacgtggaggaggacgaagggcttgacgacttggaaaatgctgaggaggagggtcaggaaaatgttgagattctcccatctggtgaacgaccgcaggccaaccagaagcgtatcaccactccatacatgaccaagtacgagcgagcccgagtgctgggcacccgggctctccagattgcgatgtgtgccccagtaatggtggagctggagggggagacagaccctttgctcatcgccatgaaggaactcaaggcccggaagatccccatcatcattcgccgttacctgccagatggaagctatgaggattggggcgtggatgagctcatcatcagcgactgagcagagctgtcaggctgtgccaggcaccatctctatgccca

SEQ ID NO: 67 - protein, 416 aa, Rattus norvegicus
  Squalene synthetase
MEFVKCLGHPEEFYNLLRFRMGGRRNFIPKMDRNSLSNSLKTCYKYLDQTSRSFAAVIQALDGDIRHAVCVFYLILRAMDTVEDDMAISVEKKIPLLRNFHTFLYEPEWRFTESKEKHRVVLEDFPTISLEFRNLAEKYQTVIADICHRMGCGMAEFLNKDVTSKQDWDKYCHYVAGLVGIGLSRLFSASEFEDPIVGEDTECANSMGLFLQKTNIIRDYLEDQQEGRQFWPQEVWGKYVKKLEDFVKPENVDVAVKCLNELITNALQHIPDVITYLSRLRNQSVFNFCAIPQVMAIATLAACYNNHQVFKGVVKIRKGQAVTLMMDATNMPAVKAIIYQYIEEIYHRVPNSDPSASKAKQLISNIRTQSLPNCQLISRSHYSPIYLSFIMLLAALSWQYLSTLSQVTEDYVQREH

SEQ ID NO: 68 - DNA, 1662 bp, Rattus norvegicus
  Squalene synthetase
ggccccgctcctcgccctgcctaccgccggcatctaaacacaggtgggagtgggagatcccgacaggtgagccccgcgccccgcagccacaaggatggagttcgtgaagtgtctaggccacccggaggagttctacaacctgctgcgattccgcatgggaggccggcggaatttcatacccaagatggaccggaactcgctcagcaacagcttgaagacttgctataagtatcttgatcagaccagtcgcagcttcgccgcggttatccaggcgctggatggggacatacgtcatgcggtgtgtgtgttttacctgatcctccgagccatggacacagtggaggatgacatggccatcagtgtggagaagaagatcccactgctgcgaaactttcacactttcctctatgagccggagtggcggttcaccgagagcaaggagaagcaccgagtagtgctggaggacttccccacgatctccctggagtttagaaatttggctgagaaatatcaaacagtgatcgctgacatctgtcacaggatgggatgtgggatggcagaatttctaaacaaggatgtaacctccaaacaggactgggacaagtactgtcactatgttgctggactggtgggaatcggcctttctcgcctattctctgcctcagagtttgaagatcccatagttggtgaagacacagagtgtgccaattctatgggtctgtttctgcagaaaacaaatatcattcgtgattatctggaagaccaacaagaaggaagacagttttggcctcaagaggtatggggcaaatatgttaagaagctggaagactttgttaagccagagaacgtagatgtggccgtgaagtgcttgaatgaactcataaccaacgccctacaacacatccctgacgtcatcacctacctgtcaaggctccggaaccaaagtgtgtttaacttctgtgccattccacaggtaatggccattgctacgctggctgcctgttacaataaccatcaggtattcaagggagtagtgaagattcggaaggggcaagcagttaccctcatgatggatgccaccaacatgccagctgtcaaagctatcatataccagtacatagaagagatttatcaccgggtccccaactcagacccgtcagctagcaaggccaagcagctcatctccaacatcaggacgcagagccttcccaattgccagctcatctcccgaagccactactcccccatttacctgtccttcatcatgctcttggctgccctgagctggcagtacttgagcactctgtcccaggtcacagaagactatgtccagagagaacactgactttgtttagctggaagcggaagtccacgtgaagtgggtttttcttcttcccccagctggattttgacttcccttggtttttccttctactctaatctttcggagaactgagtgtgggacctttaggaactctgaagaggaaaggacgccttgccctcagcagcctggtgcttcctggatgtggtccctgcctcttgtagccactggcatcatgttgaccgaagcactggaaaggccacatgtgatcctagtgaacctggctagaatgctgattgaatctatttaatttgaaacagcctttgaatacctatcacagt

SEQ ID NO: 69 - protein, 382 aa, Rattus norvegicus
  UDP-Gal
MSALKRMMRVSNRSLIAFIFFFSLSTSCLYFIYVAPGIANTYLFMVQARGIMLRENVKTIGHMIRLYTNKNTTLNGTDYPEGNNTSDYLVQTTTYLPQNFTYSPHLPCPEKLPYMRGFLSVNVSEISFDEVHQLFSKDSEIEPGGHWRPQDCKPRWKVAVLIPFRNRHEHLPIFFLHLIPMLQKQRLEFAFYVIEQTGTQPFNRAMLFNVGFKEAMKDRAWDCVIFHDVDHLPENDRNYYGCGEMPRHFAAKLDKYMYILPYKEFFGGVSGLTVEQFRKINGFPNAFWGWGGEDDDLWNRVHYSGYNVTRPEGDLGKYTSIPHHHRGEVQFLGRYKLLRYSKERQFIDGLNNLLYTPKILVDRLYTNISVNLMPELAPVEDY

SEQ ID NO: 70 - DNA, 5729 bp, Rattus norvegicus
  UDP-Gal
agcctgcaggggtctcggggcgcacagggctgccgggattgtcctcgtgggtgtccgcagtccgagatcgccgcgtgtctgtcatctgtttccttcgtcctccgggccccggccgcgcgcatccgccgggtagtccggggtccgtgcggggggcggcggcgcctctccctcgggccgggcggcgggaatgcggttgccttggccggctgggcagcgggcgcggctgcaaacggaacccgggtgcactcgccgctggccgggacgccgccctggcctgctctcggctcccgaggccgccctgcgctctggggcccggcgcggaatgaggtgcaggccgcgcaccgccgacgccccctccgcggccccctggttcaacgcggccgcccgcgcctcgcgtgccccagcgcccacgttagagcctcgcactggcagcgctcgcggaggcacaggcctgcagagcgcacgccactcggcccgggtcccgatcgcggggactcgcctcttggacaccgccccaggtgcgggaccccgacacgctgcaagcgcgcgggccgcctccgcatcgcagagctcctctagcctggcccgtggctttggcctccacggagccggatctccctgcctccctccacatttctccgcatcctttcaacacccttcccgctgctctaccacctcccattcattgcatccatttctccttcccggctcggttcttcttcccataacctccccggccggaccccgctacccacccggtacattcatggaagtttagggcctggaccgtggctcggagtctggcctgagagcgcagcggagctgctggtagggcagaggaagatgtctgcgctcaagcggatgatgcgggtctccaatcgctccctgatcgccttcatcttcttcttctccctctccacgtcctgtctctatttcatctatgtggctccaggcatcgccaacacatacctctttatggtacaagctagaggcatcatgctgagagaaaatgtgaaaacaattggacacatgatcaggctgtataccaataaaaacactacgctcaatgggacagattatcccgaaggcaataatacaagtgactatcttgttcaaacaacaacgtatcttccgcagaacttcacgtattcaccgcacctcccctgtccagagaagctgccttatatgcggggattcctcagtgtcaacgtgagtgaaatcagctttgatgaagtccatcagctcttctccaaggactcggagattgagccgggaggccactggaggccccaggactgcaagcctagatggaaggtggcagttctcatccccttccgtaaccgccatgaacacctcccgatctttttcctgcacctgatcccgatgctccagaaacagaggctggaatttgccttttatgtcatcgaacagaccggcacacaaccgttcaatcgtgccatgctctttaacgtgggtttcaaagaggccatgaaggacagagcctgggactgtgtgatcttccacgacgtggatcatcttcctgagaacgatcggaactattacggatgcggggagatgccgcggcactttgcagcgaagctggacaagtacatgtacattcttccttataaggagttctttggtggggtgagtggcctgacagtggagcaatttaggaagatcaatggctttcccaatgccttctggggatggggaggagaggatgacgacctttggaacagagttcactactctggatacaatgtaacccggccagagggggacttgggaaaatatacatctattccccatcaccatcgaggggaagtacaatttttaggacggtataaattacttcgctattctaaggagcgtcagttcattgatggattgaacaatttattatacacacccaaaatactggttgacaggctgtatacaaatatatctgtaaacctcatgccggagttagctccagttgaagactattaaaaagaagtcattcccgtggtggggtagaccacagcactgaatcatgaacttggcttggaatgcactcaccgtggaagttagagattggtgtgtatctcagtgtcccagtctgtaaaaagaaccagcagtccttaatgtttacagcgtgggctccatctgtcacactccccactctcctccctgctgggagcacctcccatggcgagcactgtcgagatacaaacccattgcttgggattggaagtgaagaaaactccctacacagagaagattttttttatactgaaatctataatttaattcaagagaatgcttttatttccgttcaaacatattttgtacatatgtgatgtaaattaaatatgttcaaattgttggaaaataagatgtcataattttgcatgtaattggttatgccttcattggacttttatagacattttttttatttgcatggggggaaaaaactgtaaatttatgtcgccagacaaaggttaagccttgtgtgaaatgaagggactgtcagcgacggacaaagataataccgtaactgtttcgttgaactggtgttcagctttagccttcagcctcatgggaagaggcacagtcctctgagggctttgaaggaaggaaggaaggactcgaatagcttttcttcctgccaggattacctgttttgtttgtttgtttttttcacttgcttgcagtctcatcagatcttgccaagtcagcagccatattgtttatgcatactgcatgagtattaccaagaaaatcttcagagttgtaaagtgacatgctgtacaggacctcttcgtgttaaatgtctctatgtacctctgctgtgtcagggatcttgtgcctcaaaaaaaaaatgtccccaaggttgtgtttatacacggtctatatttttttcaatctcataatgaacagcattattatttccactttagaagaaccaaaagaaggtatcttcttttaaaaacattttttttaaagaatgaatttatggaaaatccagtagtgcttatacagatgaattatactattagatgagaaattagatgctctatttttatgaagataaatgcttagattaaaacagactttaactttaattctcaaacgtacatagttccctttcacatcagccagtcacttgaactgttttttttttctttttttccgctttcaagaaatctctggtgttattcaaatttttttttcactaccagtataatttaatgcccccccccccccccgtccccagtggagctgggaattgaatctagggcctgtagacttaccttaaaatcattattgtatgtgtggatgctgtgacttctgaactaggtctcacagcctaacgccaggtctgctcatcctcctcacttgggtgaggcttttgacaaccaaagaacaacaaagcccaaacagtgttctgaaaattatcaattctaaagattcttgaaaaatagcttgtattctcatgtaagatcttatctcccatatttaaacaaattgaaaacatcgcctatctgtcaagtgaaccctcccaaagagcaaagagtgagagaattctgaatgtggggaagtttgtccccttgtctgacgtgagagcttagcttgcagttgtccttgtctgtcacagttttaatgctgatggccacaagccaaagtaattagatccttacaccggagaagacagacaccctatctgttgtgacagcagtctttccaggttcttcttagacgtgcttctaaaatacttacctcccaacttttttggttactcaaagtagtggggggggggggaatcacaacctgtggaaatgaagatttttgtatgctatcagttattctctgtctcttgtggctaatgaggtgtttaattcgacggaatgacagtaaagtgtaatgttaatgttaaggctggtgagacaggactctgggtgtgtggtgagcccagccctggtccctcctcctggttctgtggaatgtggtaccacgtggattcttactgggggaaacacactttataaggtgacaggctatccacagtcagcaccttttgcattgatatatagttcacagctttaggaaaattcagaactggtgaactgccttactctcttagggtaagtctggcattaacatggctgcgggagtcggatgtatttctgctaaatcttcatgctgaatctgctgtgtcagcttgtgagaaccgccttttctaattcagacctggaattattttctttttctttttctttttttttttttttttttttggagctgaggactgaacccagggccttgagcttgctaggcaagagctctaccactgagctaaatcctcaaccccctggaattattttcagtagtgaatagtgatctctatatgtcaccacaaatgacagttttgccctgttaccataaccacagtgaatctcctccttctatattagcccaagcagacagtctgatagaatcaaatgcacttggtggctttgcactgtctgcccacatccgctgccttgccaacggtggtatttaaacgtggtttttgtttgcttttgcctgaacaagtcaaatcgagacagttgaaacttacctgagattaggaagaatgtcctctggtaacttacctgtcacttgtcttagactcggagccagtgtggccacagatgctgggaggccctcgtggcactggggaaatgatcgatgcctttgaactgaagaaagaaagcatgactgacaggccgaaagttcccacgtccactgtaacattctgtctgattttttaatgaagatgtcatttaattatttgccaaaactagggttttaatgaagtggcttccccagtcccctttttatagttattttctggtgtagacccttgaggtggctcagggtataaaggtgcctctcccaagcctgacaacctacgcttgatccctggggttcacactgtagaaggagaggactaccctggtacattgttctcagacttctgtatgtgtgcggctcgcgctcacacacacacacacacacacacacacacgcgcgcgcgcaaggcaaattaaaaggtatataaaagttaaatttctgttttataaaacggtgtttaataagaaaatatttataaaatttaagtacaaaattatctattaaaaattcctattcctgccagtcaatggtggagtttgcctttaatccaagctctctggaagcaaggcaggttctctgaattggaggccagcctggcctgtggagtgagttccaagacagctggggcgacacagagaaactgtctcaaaaacaaaaccaaatcaaaacaaaaactgctattccagttgatactgataaccattgtaaaagagagcagaaatatcatcaatacaatatcgtccctttgggactccctgggggggaagcagattgtatttgtgtcattgtatctgccctgtttctttataaataacactctagatttcttgccttgggtttgcagagttgttgagaagcaaactgtcgccgtgttttttggaaggtggaagtgtacttaagattatttattatgaaatggagtacttctatgtaagtgcgttgatgtaaacgctagtgatttctcgctttttttttttgtcttgttttgcttctcatggaaatgtttgtactttttttatcattgtcttttatgaaatacaatgttctaaagaaaaaaaaaaaaaaaa

SEQ ID NO: 71 - protein, 142 aa, Rattus norvegicus [sequence omitted]

SEQ ID NO: 72 - DNA, 861 bp, Rattus norvegicus
  Light chain 3 subunit of microtubule-associated proteins 1A and 1B
ggcacgagccaggacccccgcgcgccatgccgtccgagaagaccttcaaacagcgccggagcttcgaacaaagagtggaagatgtccggctcatccgggagcagcaccccaccaagatcccagtgattatagagcgatacaagggtgagaagcagctgcccgtcctggacaagaccaagttccttgtacctgatcacgtgaatatgagcgaactcatcaagataattagaaggcgcctgcagctcaatgctaaccaagccttcttcctcctggtgaatgggcacagcatggtgagtgtgtccacacccatctctgaagtgtacgagagcgagagagatgaagacggcttcctgtacatggtctatgcctcccaggagacgttcgggacagcactggctgttacatacatgtcagctctgaaggcaacagcaacaggaagagagccatgcttgtgacagacatacagccacttccaactaaagcaagcctctgcttcctgctacctgcatggagcccactgtgacactcagaccatccccggtcactcactcgtgtctgagaatctcagtgagagctgcctctgtcacggaccggaagccaacacagccacctctcgacctgctccccacagcacccaccctccctgcatgcaagctgtccctgctaacccccaatgttatgttacactgtgtaaatccccactgctgccgtgtgtgggttgtgtacgtcgtcatgtccctggtttataactatggtgcggtcgggaaggattcctgtaatgctgctctaaggatctggctcaggcagccattgtaggacacctgtactctgatgcactaagtccaataaaggcacaactgg

SEQ ID NO: 73 - protein, 422 aa, Mus musculus
  MD6
MERKDFETWLDNISVTFLSLMDLQKNETLDHLISLSGAVQLRHLSNNLETLLKRDFLKLLPLELSFYLLKWLDPQTLLTCCLVSKQRNKVISACTEVWQTACKNLGWQIDDSVQDSLHWKKVYLKAILRMKQLEDHEAFETSSLIGHSARVYALYYKDGLLCTGSDDLSAKLWDVSTGQCVYGIQTHTCAAVKFDEQKLVTGSFDNTVACWEWSSGARTQHFRGHTGAVFSVDYSDELDILVSGSADFAVKVWALSAGTCLNTLTGHTEWVTKVVLQKCKVKSLLHSPGDYILLSADKYEIKIWPIGREINCKCLKTLSVSEDRSICLQPRLHFDGKYIVCSSALGLYQWDFASYDILRVIKTPEVANLALLGFGDVFALLFDNHYLYIMDLRTESLISRWPLPEYRKSKRGTSFLAGERPG

SEQ ID NO: 74 - DNA, 1825 bp, Mus musculus
  MD6
tggctgtggagcggacccggccgctgcgacgctctggcggcccgagcgcgcctagtcggtgtgagcccggcgcgaggtcccgggccccggggcgctcgctcaggtaaatatttccataaccttatggagagaaaggactttgagacatggcttgataacatttctgttacatttctttctctgatggacttgcagaaaaatgaaactctggaccacctgattagtctgagtggggcagtccagctcaggcatctctccaataacctggagactctcctcaagcgggacttcctcaaactccttcccctggagctcagtttttatttgttaaaatggctcgatcctcagactttactcacatgctgcctggtctctaagcagcggaataaggtgataagtgcctgtacagaggtgtggcagactgcatgtaaaaatttgggctggcagatagatgattctgttcaggactcattgcactggaagaaggtttatttgaaggctattttgaggatgaagcaactggaggaccatgaagcctttgagacctcttcgttaattggacatagtgccagagtgtatgcactttactacaaagatggacttctctgtacagggtcagatgacttgtctgcaaagctgtgggatgtaagcacagggcagtgtgtttacggcatccagacccacacttgtgcagctgtgaagttcgatgaacagaagcttgtgacaggctcctttgacaacactgtggcctgctgggagtggagttccggagccaggacccagcacttccgggggcacacgggggcggtgttcagtgtggactacagtgatgaactggatattttggtgagtggctctgcggacttcgctgtgaaagtatgggctttatctgctgggacatgcctgaatacactcactgggcatactgaatgggtcaccaaggtggttttgcagaagtgcaaagtcaagtctctcttgcacagccctggagactacatcctcttaagtgcagacaaatatgagatcaagatttggccaattgggagagaaatcaactgtaagtgcttgaagacactgtctgtctctgaggatagaagtatctgcctgcagccaagacttcattttgatggaaaatacattgtctgtagttcagccctgggtctgtaccagtgggactttgccagttatgatattctcagggtcatcaagacacctgaggtagcaaacttggccttgcttggctttggagatgtcttcgccctgctgtttgacaaccactacctatatatcatggacttgaggacagagagcctaattagccgctggcctctgccagagtacaggaaatcaaagagaggcaccagcttcctggcaggcgaacgtcctggttgaatggattggatgggcacaatgacacgggcttagtctttgccaccagcatgcctgaccacagtattcacctggtgttatggaaggagcattgctgacaccaggagctaccaccgctgactgactttgggtgccagggctgcgggttttgggtgcaatgtctatggcagccaactgcatgaaccaaagttctcacctaaaggtatcatcacgcagtgcacaatcatttatctgtttgccagggctggggcggggagggcttgtttactgacatacaccgcagcatgctaatgggatacaccattgacttcatttgatcttagttatgttggtcagtgtaagagaggttgcatttttggatttatctttctgagtggaatattgagtaaagaaagttaaatgattcactaatctgcctaattggttgcccataaaa

SEQ ID NO: 75 - protein, 403 aa, Rattus rattus
  Ribosomal protein L3
MSHRKFSAPRHGSLGFLPRKRSSRHRGKVKSFPKDDPSKPVHLTAFLGYKAGMTHIVREVDRPGSKVNKKEVVEAVTIVETPPMVVVGIVGYVETPRGLRTFKTVFAEHISDECKRRFYKNWHKSKKKAFTKYCKKWQDDTGKKQLEKDFNSMKKYCQVIRIIAHTQMRLLPLRQKKAHLMEIQVNGGTVAEKLDWARERLEQQVPVNQVFGQDEMIDVIGVTKGKGYKGVTSRWHTKKLPRKTHRGLRKVACIGAWHPARVAFSVARAGQKGYHHRTEINKKIYKIGQGYLIKDGKLIKNNASTDYDLSDKSINPLGGFVHYGEVTNDFIMLKGCVVGTKKRVLTLRKSLLVQTKRRALEKIDLKFIDTTSKFGHGRFQTMEEKKAFMGPLKKDRIAKEEGA

SEQ ID NO: 76 - DNA, 1316 bp, Rattus rattus
  Ribosomal protein L3
cgagacatatcggcggcgtgtggcggcgagatgtctcacaggaaattctcagctcctaggcatgggtccttgggcttcttgcctcggaagcgcagcagccggcatcgtggaaaagtgaagagcttccctaaggatgacccttccaagcctgttcacctcacagccttcctagggtacaaggctggcatgacccacattgtccgggaagttgaccggccaggatctaaggtgaataagaaagaagttgtggaggctgtgaccattgtggaaaccccacccatggtggttgtgggtattgtgggatatgtagaaaccccacgaggcctccggaccttcaagactgtatttgctgagcacatcagcgatgagtgtaaaaggcgtttctataagaattggcacaaatctaagaagaaggcttttaccaagtactgtaagaaatggcaagatgacacaggcaagaagcagctggagaaggacttcaacagcatgaagaagtactgccaggtcatccgcataattgctcacactcagatgcgcctgcttcctctgcgccagaagaaggcacacttgatggagatccaggtgaatgggggcactgtagctgagaagctagactgggcccgagagaggctggagcagcaggtccctgtgaaccaggtgtttgggcaagatgagatgattgacgtcatcggcgtgacaaagggcaaaggctacaaaggggtgaccagtcgttggcatacaaagaagctgccccgaaagacccacagaggtctgcgcaaagttgcttgtattggagcttggcatcctgcccgtgtagccttctctgtggctcgagctgggcagaaaggctaccatcaccgaacagagatcaacaagaagatttacaagattggtcaaggctacctcatcaaggatggtaagctgatcaagaacaatgcatctactgactacgacctgtctgacaagagcatcaacccactgggtggctttgtccattatggtgaggtgaccaatgacttcatcatgctcaaaggctgtgtggtgggaaccaagaagcgagtgcttactctccggaagtccttgctggtccagaccaagcgtcgggctcttgagaagattgacctgaagttcattgacaccacctccaaattcggacatggtcgcttccagaccatggaggaaaagaaagcattcatgggaccgctcaagaaagatcgcattgccaaggaggaaggtgcctgatgccaggagtactttgtgcagctggtggggtctcatcaataaaatattttcaattaaaaaaaaaaaaaaaaaaa

SEQ ID NO: 77 - protein, 263 aa, Rattus rattus [sequence omitted]

SEQ ID NO: 78 - DNA, 907 bp, Rattus rattus
  Ribosomal protein S4
tctttccgttcccagcgcagcatggctcgtggtcccaagaaacatctgaagcgcgtagcggctccaaaacactggatgctggataagctgactggcgtgtttgctcctcgtccatccactggtccacacaaactgagggaatgcctgcctctgatcattttcctaaggaacagacttaagtatgccctgactggagatgaagtaaaaaagatttgcatgcagcgattcattaagattgatgggaaagtcaggaccgatataacctaccctgctgggtttatggatgtcatcagcattgacaagactggagagaacttccgtctgatctatgacaccaagggtcgctttgctgtccatcgaattacacctgaggaggccaagtacaagttgtgcaaagtgagaaagatctttgtgggcacaaaaggaatcccacatctggtgacccatgatgcccgtactattcgataccctgatcccctcatcaaggtgaatgacaccattcagattgatttggaaacaggcaagataactgatttcatcaagttcgacactgggaacctgtgtatggtgactggaggtgctaacttggggagaattggtgtaatcaccaatagggagagacatcctggctcttttgatgtggttcatgtgaaagatgccaacggcaacagctttgccactcgtctttccaacatttttgttattggcaagggcaacaaaccgtggatttctcttccccgaggaaaaggaatccgccttaccattgctgaagagagagacaagaggctagcagccaaacagagcagtgggtgaaatggtctctaggagacatgctggaggagtatttgtacctcaacacaacaagcctttctaagcaacatgctagattaaacagcatgatgaaatc

SEQ ID NO: 79 - protein, 727 aa, Rattus norvegicus
  Synaptic vesicle protein 2C
MEDSYKDRTSLMKGAKDIAKEVKKQTVKKVNQAVDRAQDEYTQRSYSRFQDEDDDDDYYPPGETYSGEANDDEGSSEATEGHDEEDEIYEGEYQGIPSTNQGKDSIVSVGQPKGDEYKDRRELESERRADEEELAQQYELIIQECGHGRFQWALFFVLGMALMADGVEVFVVGFVLPSAETDLCIPNSGSGWLGSIVYLGMMVGAFFWGGLADKVGRKQSLLICMSVNGFFAFLSSFVQGYGFFLLCRLLSGFGIGGAIPTVFSYFAEVLAREKRGEHLSWLCMFWMIGGIYASAMAWAIIPHYGWSFSMGSAYQFHSWRVFVIVCALPCVSSVVALTFMPESPRFLLEVGKHDEAWMILKLIHDTNMRARGQPEKVFTVNKIKTPKQIDELIEIESDTGTWYRRCFVRIRTELYGIWLTFMRCFNYPVRENTIKLTIVWFTLSFGYYGLSVWFPDVIKHLQSDEYALLTRNVQKDKYANFSINFTMENQVHTGMEYDNGRFLGVKFKSVTFKDSVFKSCTFDDVTSVNTYFKNCTFIDTLFENTDFEPYKFIDSEFQNCSFLHNKTGCQITFDDDYSAYWIYFVNFLGTLAVLPGNIVSALLMDRIGRLTMLGGSMVLSGISCFFLWFGTSESMMIGMLCLYNGLTISAWNSLDVVTVELYPTDRRATGFGFLNALCKAAAVLGNLIFGSLVSITKAIPILLASTVLVCGGLVGLRLPDTRTQVLM

SEQ ID NO: 80 - DNA, 2622 bp, Rattus norvegicus
  Synaptic vesicle protein 2C
gcgcgctgcaggaagagtggcagaccgaagcggcctcgggctgcaaacggaggggcgctcgcgcggcgacggctgcagggctgacaccgctcagggcaggggggtcccaggcggctggaacgctctattctgaactgtgagtggatgatgctgttgcagccaagctgctgaacacactccgtggactcttccctgctgtgccttgcccatcggccgagataaaatggaagactcctacaaggataggacttcactgatgaagggcgccaaggacattgccaaagaggtgaagaagcaaacagtgaagaaggtgaaccaggcagtggaccgggcccaggatgaatacacccagcggtcctacagtcgattccaggatgaagatgatgatgatgactactacccacctggagaaacctacagtggggaggccaatgatgatgaaggctcaagtgaagccactgagggtcacgatgaagaagacgagatctatgaaggggaataccagggcatccccagcacgaaccaagggaaggacagcatagtgtctgtaggacaacccaaaggagatgagtacaaggaccgcagagagctggagtcagagaggagggctgatgaggaggagctcgcccagcagtatgagctgataatccaagagtgtggccatggccgtttccagtgggcccttttcttcgtcctgggcatggctctcatggcagacggcgtggaggtgtttgtggtgggctttgtgttacccagtgcagagacagacctatgcataccgaattcaggatctggatggctaggcagcatagtgtacctcgggatgatggtgggggcgttcttctggggaggactggcagacaaagtgggaaggaagcagtctcttctgatttgcatgtccgtcaacggattctttgccttcctttcttcatttgtccaaggttacggcttctttctcctctgtcgtttgctttcaggattcgggattggaggcgccattcccactgtgttctcctactttgctgaagtcctggcccgggagaagcgcggtgagcacctcagttggctctgcatgttctggatgattggcggtatctatgcttcagccatggcctgggccatcatcccccactatgggtggagcttcagcatgggctcagcctaccagttccacagctggcgcgtcttcgtcatcgtctgtgccctcccgtgcgtctcctcggtggtggccctcaccttcatgcccgaaagccctcggttcttgctggaggtaggaaaacatgatgaagcctggatgattctgaagctaattcatgataccaacatgagagcccggggccagccagagaaggtcttcacggtaaataaaatcaagactcccaagcaaatagatgagctgattgagattgagagcgacacaggaacctggtaccggaggtgttttgttcggatccgcacagaactgtacggaatttggttgacttttatgagatgcttcaactacccggtcagggaaaacaccataaagcttacgattgtttggttcaccctgtcctttgggtactatggactgtccgtttggttcccagatgtcattaaacacctccagtctgacgagtacgccctgctgactcggaatgtgcagaaggataaatatgcaaactttagcattaacttcaccatggaaaaccaggtccacaccggaatggaatatgacaatggcaggttcctcggagtcaaattcaaatcggtaaccttcaaggattcagtgtttaagtcctgcacctttgacgatgtgacctcagtcaacacctacttcaagaactgcacgtttattgataccctttttgagaacacagattttgagccctataaattcatagacagcgagtttcaaaactgctcgtttcttcacaataagacgggatgtcagattacttttgacgacgactacagtgcctactggatttactttgtcaactttctcgggacattggcagtgttaccaggaaatatcgtgtctgctctcctgatggacaggatcgggcgcttaacgatgctaggtggctccatggtgctctcggggatcagctgcttcttcctgtggtttggcaccagcgaatccatgatgataggcatgctgtgcttgtacaacggactgaccatctcagcgtggaactctcttgatgtagtcacggtggaactataccccacagaccggagagcaacgggctttggcttcttgaacgcactctgtaaagcagcggccgtcctgggaaacttaatattcggctccttggtcagcatcaccaaagcaatccctatcctgctggcttccaccgtgctcgtgtgtggaggactcgtggggctgcgcctgcccgacacaagaacccaggttctgatgtgacaaaagccattctcttctctcaccatgggtcagccctattgcctgactcaaggcttcagagtttttatgtatagaaaggtggccaagtatcagaactcaaacttttgctgtgacgtaaatgtagctgtgtattgtccccgccagtgtgatttgcagggtcctccccctcccccgcgccttgttatcttttcctaattgtgatgttcctgcttccg

SEQ ID NO: 81 - protein, 203 aa, Mus musculus
  ARL-6 interacting protein-1
MAEGDNRSSNLLAVETASLEEQLQGWGEVMLMADKVLRWERAWFPPAIMGVVSLLFLIIYYLDPSVLSGVSCFVMFLCLADYLVPILAPRIFGSNKWTTEQQQRFHEICSNLVKTRRRAVGWWKRLFSLKEEKPKMYFMTMIISLAAVAWVGQQVHNLLLTYLIVTFVLLLPGLNQHGIILKYIGMAKREINKLLKQKEKKNE

SEQ ID NO: 82 - DNA, 2080 bp, Mus musculus
  ARL-6 interacting protein-1
cttgctggtgttggggggatagtgtgtgttcgctcgttgataaccgcgagtctggaacgatggcggagggggataaccgcagcagcaacctgctggccgtggagactgcaagtcttgaagagcagctgcaaggctggggagaggtgatgctgatggctgacaaagtccttcgatgggaaagagcctggtttccacctgccatcatgggtgtggtttccctgctgttcctgattatctattatctcgatccatctgtgctgtctggtgtttcctgctttgttatgtttttgtgcctggctgactaccttgttcccattctagcaccaagaatttttggctctaataaatggaccactgaacaacagcaaagatttcatgaaatctgcagtaatctagtaaaaactcgacgcagagctgtgggctggtggaaacgcctcttttccctaaaggaagaaaagcctaaaatgtacttcatgaccatgatcatttctcttgctgcggtggcttgggtgggacagcaagttcacaacctgcttctcacctacctgattgtgacatttgtgctgttgcttcctggactaaaccaacatgggatcattctgaagtacattggaatggccaaaagggagataaacaaacttctcaagcaaaaagaaaagaaaaatgagtagtgtggctgccgcggagtgtgccctggccctgggcactgaagtgttacagtggctcgttgcttccctcactctgcccttgttaatagaaattctcacaggccaggctctgtgcgggctctagtgccaggtgtagctgggtacattccccgtcagtgtgacttcctttcattttgacaacttccttcctttaagatgctaagtggtgaactttactgttttgtacagtgaactgtgactttgttgatgtttgctttagctatatcaaggcagtggtctgtggctacaggaagctggttctactgtctgcttaacaaactgtctttgtgagtacagagattgggtttaccacttctgctgaggagaccacttaaaattcattcctgagtttccactgtgggagaatacccatggaataagataaaaaattaattccacaccctagtgtgtgtaagttcctcgctcataggaaatgcaacagtttgagggagcattgcccctttgttcctgtgaggactggcaggctttgactgacctctcattccctttgcactgcttcaggttagttctagtccataatggcctttgagcagcaagctttcagaagattatatttgaggattgtagcagtttctttgtttcagattgtcagctgacttaaaatgtttgtgactttcctgtaagggcagccagggataaaagtatcctttgttcaatgagtagaaaactagttatctattaatatttaagaccaggaaaaaaaaaaaagaggcttaagagtaagcctggaaaatctcacttgttttcgtagtattggctgtatttcagtgcctccagctttgcacttgagagacaagtgtttactgctgtttgactttccccttgacatttctcagaaaaatgcagggctgcagctgagagcagactgctgattggtgactctggtctgcctagcttttgcaactctttaagcttactgtgatcacgtgccctctcagtagggggcttttagagcagttgaaatctgcagaactgaacctctgagggccaaaataggacatttgggaacaactccttaacccatgaactagctgtaacatagtttgtggatccatgcactgatgctgtgaagcctgcccctgtgtgtatctgttctctcacctccctagcactgtaagcagcggtgcctcttgtagcatgtgtgtttgttttttaatgtttcatgactcccactttgattttacatgttttcttgtaaataagcctgccttcctacctggaatttgtgtgtgtgtgactaatacatgttctacgagttaactactttggcagttttaatcatttcttctttgttttgtggtaaaggggaaaaattaaaaaccagttggaacccaaaaaaaaaaaaaaaaaaa

SEQ ID NO: 83 - protein, 214 aa, Rattus norvegicus
  Ribosomal protein L14
MVFRRFVEVGRVAYISFGPHAGKLVAIVDVIDQNRALVDGPCTRVRRQAMPFKCMQLTDFILKFPHSARQKYVRKAWEKADINTKWAATRWAKKIDARERKAKMTDFDRFKVMKAKKMRNRIIKTEVKKLQRAALLKASPKKAAVAKAAIAAAAAAKAKVPAKKATGPGQKAAAQKASAQKAAGQKAAPPAKGQKGQKTPAQKAPAPKAAGKKA

SEQ ID NO: 84 - DNA, 715 bp, Rattus norvegicus
  Ribosomal protein L14
tctcgctgagcccgccaacatggtgttcaggcgtttcgtggaggttggccgagtggcctacatctcctttgggccccatgctggaaagctggtcgcaatcgtagatgttattgatcaaaacagggctttagtggatggaccctgcacccgggtgaggagacaggccatgcctttcaaatgcatgcagctcactgacttcatcctcaagttcccacacagtgcgcgccagaagtatgtacggaaagcttgggagaaggcagacatcaatacaaagtgggccgccacacgatgggccaagaaaattgatgccagagaaaggaaagccaagatgacagattttgatcggttcaaagtcatgaaggcaaagaaaatgaggaacagaataatcaagactgaagtgaagaaactccagagagctgctctcctgaaagcttctcctaaaaaagctgctgttgctaaggctgccattgcggccgctgcagcagctaaagccaaggtcccagccaagaaggcaacaggaccaggccagaaggccgcagcgcagaaggcctctgcacagaaggctgcaggccagaaggcagcgccccctgctaaaggtcagaagggtcagaagaccccggcccagaaggcacctgctccaaaggcagctggcaagaaagcatgaggaggctacacaaagaataaaggttctttttgactgaaaaaaaaaaaaaaa

SEQ ID NO: 85 - protein, 186 aa, Mus musculus
  Dynactin light chain
MAALTDVQRLQSRVEELERWVYGPGGTRGSRKVADGLVKVQVALGNIASKRERVKILYKKIEDLIKYLDPEYIDRIAIPEASKLQFILAEEQFILSQVALLEQVNALVPVLDSASIKAVPEHAARLQRLAEIHIQQQDQCVAITEESKALLEGYNKTTMLLSKQFVQWDELLCQLEAAKQVKPAEE

SEQ ID NO: 86 - DNA, 819 bp, Mus musculus
  Dynactin light chain
cggcacgaggcgatggcggctctgaccgatgtgcagcggctacagtctcgagtggaggagctggagcgctgggtgtacgggccgggcgggacccgaggctccaggaaggtggctgacggtctggtcaaggtgcaggtggctttagggaacattgccagtaagagggagagggtgaagattctctacaaaaagattgaagacctgattaaatacctggatcctgagtacattgatcgcattgccatacctgaggcctcgaagttgcagttcatcttagcagaggagcagttcatcctctcccaggtggcactcctggaacaagtgaacgccctggtgcctgtgctggacagcgcttctatcaaagctgttcctgagcatgctgcccgcctgcagcgcctggcggagatccacatccagcagcaggaccagtgtgtggcgatcactgaagagtctaaggctctcctggaagggtataacaagactacaatgcttctctccaagcagtttgtgcagtgggatgagttactctgccagctagaggctgccaagcaagtgaagccagcagaggaatgacagccactccccacgtccccaccaggggaaggcaggcggctcgagggcctcgcaccaacctgtctctataaggcagagacagcttcatctctgaattcagatactacctgtctgtgttcgactggcggctctgaggtcagggtcaggttgaccttagagtcatgatctgtactccctgtcaatgtatttattccagtgacaataaacttgaacgaccactaaaaaaaaaaaaaaaaaaaaaaaaaa

SEQ ID NO: 87 - protein, 128 aa, Rattus norvegicus
  Ubiquitin/ribosomal protein L40
MQIFVKTLTGKTITLEVEPSDTIENVKAKIQDKEGIPPDQQRLIFAGKQLEDGRTLSDYNIQKESTLHLVLRLRGGIIEPSLRQLAQKYNCDKMICRKCYARLHPRAVNCRKKKCGHTNNLRPKKKVK

SEQ ID NO: 88 - DNA, 467 bp, Rattus norvegicus
  Ubiquitin/ribosomal protein L40
  misc_feature (467): n is a or g or c or t
cggcagccaacatgcagatcttcgtgaagaccctgacgggcaagaccatcactcttgaggtcgagcccagtgacaccatcgagaatgtcaaggccaagatccaagacaaggaaggcatcccccctgaccagcagagactgatctttgctggcaaacagctggaggatggccgcaccctgtccgactacaacatccagaaagagtccaccttgcacctggtgctgcgtcttcgcggtggcatcatcgagccgtcccttcgtcagcttgcccagaagtacaactgtgacaagatgatctgccgcaagtgctacgcacgcctgcacccccgtgcagtcaactgccgcaagaagaagtgcggccacaccaacaacctgcgccccaagaagaaggtcaaatagagctgggcctatacctggcctgtgaccccgggaccaaataaagtccccttccatcgactggagcagtan

SEQ ID NO: 89 - protein, 694 aa, Rattus norvegicus
  Short type PB-cadherin
MRPRPAGALRAGAALSPVLLLLLLLQLLGHLWAASTPAPSSLSPGTQQDNQLGAGRVKRGWVWNQFFVVEEYTGTEPLYVGKIHSDSDEGDGTIKYTISGEGAGTIFLIDELTGDIHATERLDREQKTFYTLRAQARDRATNRLLEPESEFIIKVQDINDSEPRFLHGPYIGSVAELSPTGTSVMQVMASDADDPTYGSSARLVYSVLDGEHHFTVDPKTGVIRTAVPDLDRESQERYEVVIQATDMAGQLGGLSGSTTVTIVVTDVNDNPPRFPQKMYQFSIQESAPIGTAVGRVKAEDSDVGENTDMTYHLREESGSGGDAFKVTTDSDTQEAIIVVQKHLDFESQQVHTVVLEALNKFVDPRFADLGTFRDQAIVRVAVTDVDEPPEFRPPSGLLEVQEDAQVGSLVGVVTARDPDAANRPVRYAIDRDSDLEQIFDIDADTGAIVTGKGLDRETAGWHNITVLAMEADNHAQLSRASLRIRILDVNDNPPELATPYEAAVCEDAKPGQLIQTISVVDRDEPQGGHRFYFRLVPEEPSNPHFSLLDIEDNTAAVHTQHVGFNRQEQDVFLLPILVVDSGPPTLSSTGTLTIRICGCDSSGTIQSCNTTAFVMAASLSPGALIALLVCVLILVVLALLILTLRRHHKSHLSSDVDEDMRDNVIKYTLGSGHRGTSNKEDHQCPASLSLGFKP

SEQ ID NO: 90 - DNA, 4153 bp, Rattus norvegicus
  Short type PB-cadherin
ctcatgcttggcggcgcgggccaagccccggagcatggaccagaggcaccgcagcggtactgcgtcacatggtgacctcagcctcagggatgccgggctggactgggagggggcgcggccgcacccgggcatggacacccggtcctggcccgcgcccccctcgctgaagccccaggtccagtcactaggcagcccggccgctccccgaggttcccaatggatctggatgacccctaatcccagaaagacttcaagatccttttgctcccactgaccacaccatctgggtacagggaccatggcacaagccctactcaggagcagctactgggctgcctagtgactggacctggggcttcagcgaggggggcgcgggccaggaccgggtgtccatgcccgggtgcggccgcgccccctcccagtccagcccggcatccctgaggctgaggtcaccatgtgacgcagtaccgctgcggtgcctctggtccatgctccggggcttggcccgcgccgccaagcatgaggccacggccagcaggggcgctccgggccggggctgcgctgtcgcctgtgctgctgcttctgctactgctacagctgctggggcatctgtgggccgcaagcacacctgccccatcctccttgtcacctgggactcagcaggacaaccagctgggtgcaggccgagtgaagcgcggttgggtgtggaaccaattcttcgtggtggaggagtacacggggacagaacccctgtacgtgggcaagatccactcggattctgacgaaggcgacgggaccatcaagtacaccatctcgggcgagggtgcagggaccatcttcctgatcgacgagctgacaggtgacatccacgccacggagcgcctggaccgggagcagaaaaccttctacacactccgggcccaagccagggatcgagccaccaaccgtctgctggagccggagtcagagttcatcatcaaagtgcaggacatcaacgacagtgaaccacgctttctccacggcccctacatcggcagtgtggccgagctgtcacctacaggcacgtccgtgatgcaggtgatggcctctgatgcagatgaccccacttacggcagcagtgcccggctggtgtacagcgtcctggacggcgagcaccacttcacagtggaccccaagacaggtgtgatccggacagcagtgcctgacctcgaccgtgagagccaggaacgctacgaggtggtaatccaagccacggacatggcaggccagctgggcggcctctcaggctccactacagtgaccatcgtggttactgatgtcaacgacaacccaccccgctttccacaaaagatgtaccagttcagcatacaggagtcagcgcccatcggcacagccgtaggccgagtgaaggcggaggactcagatgtgggcgagaacacagacatgacttatcacctgagagaagaaagtggcagtggaggagacgcattcaaggtcaccacggacagcgacactcaggaggccatcatagtggtgcagaagcacctggacttcgagtcgcagcaggtccacacagtggtactggaagccctcaacaagtttgtggacccccgcttcgccgacctgggcacattccgagaccaggcaatcgtgcgcgtggccgtgaccgatgtggatgagccccccgagttccggccaccctccggcctactggaggtgcaggaggacgcgcaggtgggctccctggtcggcgtggtgacggcgcgggaccccgacgccgccaaccggcccgtccggtacgccattgaccgagactcggatttggagcagatcttcgacatcgatgcggacactggcgccatcgtgactggcaaggggctggaccgtgaaaccgccggctggcacaacattactgtgttggccatggaagcagacaatcatgctcagctgtctcgggcatccctacggatccgaatcctggatgtgaatgacaatcccccagagctggccacaccctacgaggccgctgtgtgtgaagacgccaagccaggccagctcattcaaaccatcagtgtggtggacagagacgaaccacagggcggccaccgcttctatttccgcctggtaccagaggaacccagcaaccctcacttctctctgctggacatcgaagataacacggctgcggtgcacacccagcatgtgggcttcaaccggcaagagcaggatgtgttcctcctgcccatccttgttgtggacagcgggccacccaccctgagcagcacaggcaccctcaccatccgtatctgcggctgtgacagttccggtaccatccagtcctgcaacaccactgcctttgtcatggctgcctccctcagcccgggagcactcatcgctctcttggtctgtgtcctcatcctggtcgtgctggctttgctgattctcaccctcaggcggcaccacaagagccacctgagctcagatgtggatgaagacatgcgggacaacgtgatcaaatacaccctgggatcaggacatcgagggacaagcaacaaagaggatcatcagtgtccagctagtctctctctggggttcaaaccttgaatcaatgccctagtgagggggcactggccatgacccctcaacctttgctctgcttgtatcttgagtctgagtccttccctgtacatctgtgctcgtgttcatcagctagtgaactgaagtgcttccctccccgaggggggtcgtcccttgtgactgaccatgttgtcctaacaatgtcctgagcagaagggtccccaatgggaacctctcaggaggggggtttggggcggcgggggggggaccagcatcttgctggcaactgtgggtggggtggggtgcttccttctggaatgagcatgtggctgacccccaaaggcatgccccctccccccccacccaccttcttggagatgtcccttccttttggggtagtggggacattaggagcaacctcctagggttgttgtgagaattaaatgaactgtagcagcctgaggcagggctgggcagaaacctcagcacatgtttgttgaaaggtttgcaggtggatcaagtcacccaactcacagtctcatgtgtctcgtctattctcctgcagactcctgtagcccctatgcccagggctcttcttgctccagctaggggctcctaaagacaacaggccgtccaggagactttgagtaaggacatgagtaatgtgtgtggccatttccagagcactttctatgtaatatgaccgtgttattcctatgtaattcgtgtgtgtcaagggggtagcctcgtgtctagagaggggtgaattggcattgatttttttttattagttttcatgacttttaaagaggtaggtgggaaagagaactgggagagccccacctcactcgtggggttgaggacaatggactcttttgctacagtggctaagacgggggtggggacaaagtcggacatggttggcattgtgatgacctctcatggtccggtttcccccgtccctgcctaacgttttttattatcaaacatttcacaacggggaaatttcttgcttcccaagggtggtcttggggagctgctgggaatcaggggagggggtggtggtggcccaagtctggtagcatgtgctgacctcacctcttagcaacggtgtgaccttaaacaagtcatttagcttccaagtttcagttcctttcacacctagatagacatttaaaaagaaaaaaaaaaaggaaagagaaagtggggggtggggggaggtggggtggtggggggtggggggaaaacagctggtctaccccacagagtgcttctgaagaccaaacgatgtaactcacaagaaagtgccttgtaaatcgcccagaaattgccaaatacttactaaccaaggaggctgtccctaccgcccactggccagcccgaggctcactgttgtgagcacacagtaggggctgggtatttgtgctcgataaataatttccagagttagaaagaaaaaaaaagttcattcaacaaacattttctgagacgctgaccatgtgccccatgcaccaggctatggctgaggtacaaagataatgacgaacagtctctttcggaggctaattaggacccg

SEQ ID NO: 91 - protein, 58 aa, Rattus norvegicus
  Guanine nucleotide binding protein gamma 3
STMSIGQARKMVEQLKIEASLCRIKVSKAAADLMTYCDAHACEDPLITPVPTSENPFR

SEQ ID NO: 92 - DNA, 175 bp, Rattus norvegicus
  Guanine nucleotide binding protein gamma 3
cagcactatgagtattggccaagcacgcaagatggtggaacagcttaagattgaggccagcttgtgccggataaaggtgtccaaggcagcagcagacctgatgacttactgtgatgcccacgcttgtgaggatcccctcatcactcctgtgcccacttcggagaaccccttccgg

SEQ ID NO: 93 - protein, 375 aa, Rattus rattus
  Cytoplasmic gamma isoform of actin
MEEEIAALVIDNGSGMCKAGFAGDDAPRAVFPSIVGRPRHQGVMVGMGQKDSYVGDEAQSKRGILTLKYPIEHGIVTNWDDMEKIWHHTFYNELRVAPEEHPVLLTEAPLNPKANREKMTQIMFETFNTPAMYVAIQAVLSLYASGRTTGIVMDSGDGVTHTVPIYEGYALPHAILRLDLAGRDLTDYLMKILTERGYSFTTTAEREIVRDIKEKLCYVALDFEQEMATAASSSSLEKSYELPDGQVITIGNERFRCPEALFQPSFLGMESCGIHETTFNSIMKCDVDIRKDLYANTVLSGGTTMYPGIADRMQKEITALAPSTMKIKIIAPPERKYSVWIGGSILASLSTFQQMWISKQEYDESGPSIVHRKCF

SEQ ID NO: 94 - DNA, 1880 bp, Rattus rattus
  Cytoplasmic gamma isoform of actin
gggggggggggctgccgatcgcaatggaagaagaaatcgccgccctcgtcattgacaatggctccggcatgtgcaaagctggctttgctggggacgacgcccccagggccgtgtttccttccatcgtcgggcgcccccgacaccagggtgtcatggtgggcatgggccagaaagactcgtacgtgggtgatgaggcccagagcaagaggggtattctgaccctgaagtaccctattgagcacggcattgtcaccaactgggacgacatggagaagatctggcaccacaccttctacaacgagctgcgtgtggcccctgaggagcacccggtgcttctgaccgaggcccccctgaaccccaaagctaacagagagaagatgacgcagataatgtttgaaaccttcaataccccagccatgtacgtggccattcaggcggtgctctccttgtatgcatctgggcgtaccactggcattgtcatggactctggtgacggggtcacacacacagtgcccatctatgagggctacgcccttccccacgccatcttgcgtctggacctggctggccgggacctgacagactacctcatgaagatcctgactgaaaggggctacagctttaccaccactgctgagagggaaattgttcgtgacataaaggagaagctgtgctatgttgccctggattttgagcaagaaatggctactgctgcatcatcttcctctttggagaagagttatgagctgcctgatgggcaggtgatcaccattggcaatgagcgcttccggtgtccagaggctctcttccagccttccttcctgggcatggagtcctgtggcatccacgagaccaccttcaactccatcatgaagtgtgatgtggacatccgcaaagacctgtatgccaacacagtgctgtctggtggtaccaccatgtatccaggcattgctgacaggatgcagaaggagatcacagccctggctcccagcacaatgaagattaagatcattgctcctcctgaacgcaagtactcagtctggattggcggctccatcctggcctcactgtccaccttccagcagatgtggatcagcaagcaggagtatgacgagtcaggcccctccattgtccaccgcaaatgcttctagatggactgagcaggtgccaggcatctgctgcatgagctgattctgaagtatcgatttgccctggcaaatgtacacacctcatgctagcctcatgaaactggaataagcctttgaaaagaaatttgtccttgaagcttgtatctgatatcagcactggatcgtagaacttgttgctgatttttgaccttgtattcaagttaactgttcccttggtatatgtttaataccctgtgcatatcttgatttagtccttagttcatgtggctcggtcacttggtggctggggagatctgtggaaaagtcagtcagtccccagcctagtggatctctgtgagcaccatgtagtgatctgtgcagggtattaaccaacagcagacttccaggatttcccgaggctggcaagggttcctgaactagttaccacttcttttcttgccagtctaacagggtgggaaagtccgagccttaggacccagtttctgttctggttttttccctcctgacctccatgggttgttacttgccttgagttgggaacgtttgcatcgacacctgtaaatgtattcatccttttaatttatgtaaggtttttgtactcaattctttaagaaatgacaaattttggttttctactgttcagtgagaacattaggccccagcaacacgtcattgtgtaaagagaaataaaagtgctgcagtaaaaaaaaaaaaaaaccccccccccccccc

SEQ ID NO: 95 - protein, 295 aa, Rattus norvegicus
  Beta chimaerin
MLCTSPVNCLDSVCCTSINISSLVRRAALTHNDNHFNYEKTHNFKVHTFRGPHWCEYCANFMWGLIAQGVRCSDCGLNVHKQCSKHVPNDCQPDLKRIKKVYCCDLTTLVKAHNTQRPMVVDICIREIEARGLKSEGLYRVSGFTEHIEDVKMAFDRDGEKADISANIYPDINIITGALKLYFRDLPIPIITYDTYTKFIEAAKISNADERLEAVHEVLMLLPPAHYETLRYLMIHLKKVTMNEKDNLMNAENLGIVFGPTLMRPPEDSTLTTLHDMRYQKLIVQILIENEDVLF

SEQ ID NO: 96 - DNA, 1118 bp, Rattus norvegicus
  Beta chimaerin
acgactggtatcagattaatgtcttgtatatctgaattccgcggaattacgcagcattcaacagagagaagagacctgggactaaaactgggattccaaaaagaatcctgcagtgtggcagcctgcttctcaccttctcacctcggagttggctgaacccagaaccaaatgctttgcacgtctcccgtcaactgcttggactcagtttgttgcacttcgataaatatctcttcactggtccgaagagctgccctcacacacaatgacaaccacttcaactatgagaagacacacaacttcaaggtgcacacatttcggggcccacactggtgtgaatactgtgccaattttatgtgggggctcatcgcccagggagtccggtgttcagattgtgggttaaacgtacacaaacaatgttccaagcacgtccccaacgactgccagcccgatctcaagaggatcaagaaagtatactgttgtgatctcaccacacttgtaaaagctcacaacactcagagacccatggtggtggacatatgtattcgggaaattgaagcaagaggattaaaatcagaagggctttacagagtctctgggttcacagaacacattgaagatgtcaagatggcgttcgacagagatggtgaaaaggcggatatctctgctaacatctacccagacataaacatcatcaccggagccctgaaactgtacttcagagacttacccatccccatcatcacatatgacacctataccaagtttatagaggcagcaaaaatctccaatgcagatgagaggcttgaagctgtccatgaggtcctgatgctgctgcctcctgcccactatgagaccctgcgctacctgatgatccatctcaaaaaggttaccatgaatgaaaaggacaatttaatgaacgcagaaaatctggggatcgtgtttgggcccaccctgatgagaccccctgaagacagcaccctcaccaccctccatgacatgcggtaccaaaagctgatcgtgcagattttaatagaaaacgaagatgttctgttttagtccatcagggaagtgcagctgatagagctagtggaataaaaacgtttctcaaaaaaaaaaaa

SEQ ID NO: 97 - protein, 110 aa, Rattus norvegicus
  Parvalbumin
MSMTDLLSAEDIKKAIGAFTAADSFDHKKFFQMVGLKKKSADDVKKVFHILDKDKSGFIEEDELGSILKGFSSDARDLSAKETKTLMAAGDKDGDGKIGVEEFSTLVAES

SEQ ID NO: 98 - DNA, 961 bp, Rattus norvegicus
  Parvalbumin
tttcccaacaggatctcccaccagcccagcttttctatataggctctgacctctggtcatccaagttgcaggatgtcgatgacagacttgctcagcgctgaggacatcaagaaggcgataggagcctttactgctgcagactccttcgaccacaaaaagttcttccagatggtgggcctgaagaaaaagagtgcggatgatgtgaagaaggtgttccacattctggacaaagacaaaagtggcttcattgaggaggatgagctggggtccattctgaagggcttctcctcagatgccagagacttgtctgctaaggaaacaaagacgctgatggctgctggagacaaggacggggacggcaagattggggttgaagaattctccactctggtggccgaaagctaagtggcgctgactgcttgggtctcccacctctccaccccccatgccccatctcagcccttctcgcggccctcctgggtttctgttcagtttgtttatgttattttttactcccccatcctttatggccctcgaatgacaccactcttctggaaaatgctggagaaacaataaaggctgtacccatcggacaccacctgtagggaggacccaggcctggtaggtgttggtttggcaagtttttccggacagcagtgggggtatagtagaaaaagtgagagagagcgaaggaccacgccctgatatttcctgcctgcttggtaccgagtggtcacgtgggccaccttgttcagtctttgtgcctttcctacaaggggatgggatggcgcaggggattttaaagatgcagaaactgccttttaaagagcagaacggaaggggctgagtccacaggtgattactttatgtccctgaggaataactaggtcgaaggactcaaatgacactctatcaattgcttttgactttgctgtgataaaattcctgataagagaaactt

SEQ ID NO: 99 - protein, 245 aa, Mus musculus
  BAP31
MSLQWTTVATFLYAEVFAVLLLCIPFISPKRWQKVFKSRLVELVVTYGNTFFVVLIVILVLLVIDAVREILKYDDVTEKVNLQNNPGAMEHFHMKLFRAQRNLYIAGLSLLLSFLLRRLVTLISQQATLLASNEAFKKQAESASEAAKKYMEENDQLKKGAAEDGDKLDIGNTEMKLEENKSLKNDLRKLKDELASTKKKLEKAENEALAMQKQSEGLTKEYDRLLEEHAKLQASVRGPSVKKEE

SEQ ID NO: 100 - DNA, 1132 bp, Mus musculus
  BAP31
ggatgagtttgcagtggactacagttgccaccttcctctacgcagaggtctttgctgtgttgcttctctgcattcccttcatttctccaaaaagatggcagaaggtttttaaatcccggctggtggagttggtagtgacctatggcaacactttctttgtggttctcatcgtcatccttgtactgttggttattgatgctgtacgagagatcctgaaatacgatgatgtgacagaaaaggtgaacctccagaacaatccaggtgccatggagcacttccacatgaagcttttccgtgctcagaggaatctctatattgctggcctttccttgctgctgtccttcctgcttagacgcctggtgactctcatctcccagcaggccacactgctggcctccaatgaagcctttaaaaagcaggcagaaagtgccagtgaggcggccaagaaatacatggaggagaatgatcagctaaagaagggagctgccgaggatggagacaagttggatattgggaatactgaaatgaagttagaggagaacaagagcctgaagaatgacctgaggaagctaaaagatgagctggccagcaccaagaaaaaacttgagaaagctgaaaacgaggctctggctatgcagaagcagtctgagggccttaccaaagaatatgaccgcctgctagaagaacatgccaaactgcaggcatcagtacgtggtccctcagtcaagaaggaggagtaaaggcttggtgtttccctgcctgccgctggcttctacctgacccatgcttactgcttccttggagcccagactatccctctggtacttgggtttattccctacttccccaattttcttccatggcttatagatcattattttggcaccattacacatactgctcttataccaaaagggacctgattgttgtttattcagagtacttttgccactgttctgcctggctagggcactttccactcctggaagtgtagaaaagcactggtgacctggcctgcagtttgaacccctttttattttgcaatgtaccctaaaggaggctgctgtgaagcaggtcaactgttttatcctgaggggaataaatgttgttatgttataaaaaaaaaaaaaaa

SEQ ID NO: 101 - protein, 928 aa, Rattus norvegicus
  Protocadherin 2C
MQRREDCKGLVFLGVLLGMLWKAGSTQIRYSVPEELEKGSRVGNISKDLGLKSCELAERGVRIVSRGRAQLFALNPRSGSLVTAGRIDREELCMGSIKCQLNLEILMEDIGKIYGVEIEVRDINDNAPYFRESELEIKMSENAAAGMRFPLPHAWDPDIGKNSLQSYQLSPNAHFSLEVQNGADGNKYPELVLESSLDREEKAAHLLVLTASDAGDPVRTGTARIRVMVVDANDNAPAFARSEYRVSWENVAVGTQLLLVNATDPDEGANAEVIYSFRYVDDKAAKVFKLDSNLGTISTIGELNHEESGFYEMEVQATDNAGYSARAKVLVTVLDVNDNAPEVAITSLTNSVPENSPQGTLIALLNVNDQDSGENGQVICSIQENLPFKLEKSYGNYYRLVTDAVLDREEVPSYNITMTATDRGSPPLTTETHLALDIADTNDNSPVFLQASYWAYIPENNPRGASIASVTAHDPDSDKNAQVTYSLAEDTHQGVPLSSYVSINSDTGVLYALHSFDYEQFPDLQLQVIARDSGDPPLSSNVSLSLFVLDQNDNVPEILYPTLPTDGSTGVELAPRSAEPGYLVTKVVAVDRDSGQNAWLSYRLLKASEPGLFSVGLHTGEISTARALMDRDALKQNLVVSVQDHGQPPLSATVTLTVAIADSIPDVLADLDNLESPSTSETSGLTLYLVVAVAAVSTVFLVFVLVLLALRLRRWHSLRLLRAGGPGLADVAASHFVGVDGVQAFLQTYSHEVSLTAGSRKSHLIFPQPNYADTLISQESCEKTEPLLPSGDSVFSKDNHALNQQAPPNTDWRFSQAQRPGTSGSQNGDETGTWPNNQFDTEMLQAMILASASEAADGSSTLGGGAGTMGLSARYGPQFTLQHVPDYRQNVYIPGSNATLTNAAGKRDGKAPAGGNGNKKKSGKKEKK

SEQ ID NO: 102 - DNA, 4643 bp, Rattus norvegicus
  Protocadherin 2C
ctcgtcccacctcctaactgtcgtgctccaaggcttcaaaagcagattctggttcaggtgatcagaggcagaattggaaataatcctcagttggtgatgatccccatgcaacggcgggaggactgcaaagggctggtcttcctgggagtcctcctcgggatgctgtggaaagctggatccacccagatacgctattcggttcccgaggagctggagaaaggctctagggtgggcaacatctccaaggatctggggctgaagtcctgcgagctggcggagcgaggggtccgcatcgtctccagaggtagggctcaacttttcgctctaaaccctcgaagcggcagcctggtcaccgcgggcaggatagaccgggaggagctgtgtatggggtccatcaagtgtcagttaaatctagagattctgatggaagatatagggaaaatatacggagtagaaatagaagtgagggacattaacgacaacgctccctacttccgtgaaagtgaattagaaataaaaatgagcgaaaacgccgccgctgggatgcggttccctcttccccacgcttgggatccagatatcgggaagaactcgcttcagagctaccagctcagcccgaatgctcacttctcactggaggtgcagaacggagctgatggtaacaagtacccagaattggtgctggagagctcgctggatcgggaggaaaaggccgctcatctcctagtcctcaccgcttccgacgcgggagacccggttcgcactggcacagctcgcatccgcgtgatggttgtggatgcgaacgacaacgcacctgcgtttgctcggtccgagtaccgcgtgagctgggagaacgtggctgtgggcactcagctgctgctggtcaacgccaccgacccagacgaaggcgccaatgcggaagtgatctattccttccggtacgtggacgacaaggcagcgaaagttttcaagctggacagtaacttggggacaatatcaacaataggggagctgaatcatgaagaatcggggttctacgagatggaggtgcaagctacagataacgcgggatattctgcacgggccaaggtcctggtcacagttctggacgtgaacgacaatgcccctgaagtagccatcacgtccctcaccaactctgtcccagaaaactctccccaaggtacattaatagcacttttaaacgtaaatgatcaagattctggggaaaatggacaggtaatctgttccatccaagagaatctgccctttaagttagaaaagtcttacggaaactattatagattagtcacagatgcagtcctggaccgagaagaggttcctagttacaacatcacaatgaccgccactgacaggggaagtccgcccctgacaacagaaactcacctcgcactggacatagcagacacgaacgataactcgcccgttttccttcaggcctcatactgggcctacatcccagagaataaccctagaggggcctctatcgcatccgtgaccgcccacgaccccgacagtgacaaaaatgcccaagtcacttactccctagctgaggacacccaccagggcgtgcccctttcctcttacgtttccatcaactcggacactggtgtcctgtacgcactgcattcctttgactacgagcagttcccagacctacaactgcaagtgatagcgcgtgacagcggggacccgccactcagcagcaacgtgtcactgagcttgttcgtgctggatcagaatgacaacgtccccgaaatcttgtaccccactctccctaccgacggttctactggagtggagctagcaccccgctcagcagagcctggctatctggtgacaaaggtggtggcagtggacagagactcaggacagaacgcctggctgtcctaccgtctgctaaaggccagcgagccagggctcttctccgtggggctgcacacgggcgagataagcacggctcgggccctgatggacagagatgctctcaaacagaacctcgtagtgtctgtgcaggaccacggccagcctcctctctctgccactgtcacgctcactgtggcgatcgccgacagcatccccgacgtcctggcagatctagacaatctagaatctccttccacctccgaaacttcagggctcactctctatctggtggtggccgtggcggcggtctccaccgtcttcctggtctttgttctggtgctgctggcgctcaggctgcggcgctggcactcactgcgcctgctccgggctgggggacccggattggctgacgttgcagcctctcactttgtgggcgtagacggagtgcaagctttcttgcagacttattcgcacgaggtctcgctcactgctggctcccgaaagagtcacttgattttcccgcagcccaactatgcagacacgctcatcagccaggagagctgcgagaaaaccgagcctcttttaccatcgggtgattcggttttttctaaagacaatcatgcattaaatcagcaagccccgcccaacactgactggcgtttctctcaagcccagagacccggcacgagcggatcccaaaatggtgatgaaactggcacctggcccaacaaccagtttgatacagagatgctgcaagccatgatcttggcctctgccagcgaagctgctgatgggagctctaccctgggagggggcgctggcaccatgggtctgagcgctcgatacggaccccagtttaccctgcagcacgtgcctgactaccgccagaacgtgtacatccctggcagcaatgccacgctgaccaatgccgctggcaaacgagatggcaaggctccagcaggtggtaatggcaacaagaagaaatcgggcaagaaagagaagaagtaatatggaggccaggccttgaaccacaaggcagcctccctccccagccagtccagctcgtccttacttgtacccaggcctcagaatttcagggctcaccccaggatactggtaggagccagggccatgctccccgttgggaaacagaaacacgtgcccaagccaacaccccctctctataccctagggagttgaatatgcaaagagagttctgctgggtcccccctattcaatcagtgattgtacccacatgggtagcagggtttgtgtgtgtggacatacacacacacacacacacacacacacacaaaccatgccacactcccttagttacagctgaactcctccatcttccaacccaggcaggcttatccatctcctgccgccctctccccaccccacccactccttcagtccctctctttgagcaaggtagctgggctgttggggtgaccggtgagctaagccggctcctagttctgaacggtagggagagtattacaatcttttggcctctccttcagttcagctttcccccaaagcatggtttggtaccagtcttctcttttccttccagagcctgagaccaatgcttaagttttgggggaacaggcaccctccctctggtactgatgatgcttgctggattttgggaaggcattttgctactaagcctcttttcaatgcctggggacaactagtcttttgtttttcattgtttgatgttcccactgcatgctgtgacttccctacacctcaaagaagagactcctttgcatgtctggagacagtagggggtggtaaactaaagggaagttgagagtgtatactgctgggagtggggcagtggacaaaacagcctgttaatagggtcttgcaaggggctctgtatgtacccaggggactggctcaatcctcacattctagccatagacaaacaccaggccagacccctccattctggttcagcctgggcagcttgggctgagccaccaggaccaatggatttaagctgacatttcagtccaagaacacgacttctaagtgagtttaagaccagagaggaaagaggggcctctgtgggtgctgggtactccagaggtgcccttggtgggaggaccagtggtcttagcaggaaggggggcccagcaaggtcattcttggaccctgggtctagtccagtagctagaaaaagggaccaagtggccataaagtcccagccaatgatggggcttttccagtgggcccctgtagacctcaagcccctggcctccaccttaccaggtgccatttcttctcagaaggccactgcccaggcccccaggccgcccccttgtggccagagaacggttaaagccccccagtgcctccttgtgcatagaacttcctctgccctagcccttacagtagtagtagaagatccccctcccccgctggtgtagaatagccaatagtatagtgtggtgtgcttttacgtgatggcgagtgggcagcgggcggtgggctgtacacagccgtctgtcctttgaatctcaatctgcctgcgcggcccgtgctgtgttttgtgctgtgtccacacgctgcggcgacccctccctgtactgacttctctataaaaagcttctcttcgcatagtcacgtagctcctgcccatcccccttccgatatctctcgcaagttttatactctaatatttatatggcttttttcttcgaaaattaaaaataaaaaaatggtttcttctgaaaaaaaaa

SEQ ID NO: 103 - protein, 165 aa, Rattus rattus
  Ribosomal protein L12
MPPKFDPNEIKVVYLRCTGGEVGATSALAPKIGPLGLSPKKVGDDIAKATGDWKGLRITVKLTIQNRQAQIEVVPSASALIIKALKEPPRDRKKQKNIKHNGNITFDEIVNIARQMRHRSLARELSGTIKEILGTAQSVGCNVDGRHPHDIIDDINSGAVECPAS

SEQ ID NO: 104 - DNA, 664 bp, Rattus rattus
  Ribosomal protein L12
ctttcggttcggaggaggcaacggtgcaactttcttcggtcgtcccgaatccgggttcatccgacaccagccacctccaccatgccgcccaagttcgaccccaacgagatcaaagtcgtgtacttgaggtgcaccggaggcgaggtcggcgccacatccgccttggcccctaagatcggtcctctgggtctgtctcccaaaaaagttggtgatgacatcgccaaggctaccggtgactggaaaggcctcaggattacagtgaaactgaccatccagaacagacaggcccagattgaggtggtgccctctgcctctgccctgatcatcaaagccctcaaggagccaccaagagacaggaagaagcagaaaaacattaaacacaatggaaacatcacttttgatgagattgtcaacattgcccggcagatgagacaccggtctttggccagagaactttctggaactatcaaggagatcctgggtactgcacagtctgtgggctgcaatgtggacggccgccaccctcatgacatcatagatgacatcaacagtggtgcggtggagtgcccagctagttaagaagcaacgagaaggggttgggaatttagctcagtggtagagcgcttgccaagcccaaggccctgggttcagtccccagctccgg

SEQ ID NO: 105 - protein, 244 aa, Mus musculus
  Cell surface glycoprotein A15
METKPVITCLKTLLIIYSFVFWITGVILLAVGVWGKLTLGTYISLIAENSTNAPYVLIGTGTTIVVFGLFGCFATCRGSPWMLKLYAMFLSLVFLAELVAGISGFVFRHEIKDTFLRTYTDAMQNYNGNDERSRAVDHVQRSLSCCGVQNYTNWSSSPYFLDHGIPPSCCMNETDCNPLDLHNLTVAATKVNQKGCYDLVTSFMETNMGIIAGVAFGIAFSQLIGMLLACCLSRFITANQYEMV

SEQ ID NO: 106 - DNA, 1720 bp, Mus musculus
  Cell surface glycoprotein A15
ggagaatggagaccaaacctgtgataacctgtctcaaaaccctcctcatcatctactccttcgtcttctggatcactggggtgatcctgttggccgttggagtctggggaaagctgactttgggaacctatatctccctgattgctgagaactccacaaatgctccctatgtgctcattggaaccggcaccaccatcgtggtttttggcctctttggatgctttgctacatgccgtggtagtccatggatgctgaaactgtatgccatgttcctgtccctggtgttcctggctgagcttgttgctggcatttctggatttgtgtttcgtcatgagatcaaggacaccttcctgaggacttacacggatgccatgcagaactacaatggcaatgatgagaggagccgggctgtggaccatgtgcagcgcagcctgagctgctgtggcgtgcagaactacaccaactggagcagcagcccctacttcctggaccatggcatcccccccagttgctgcatgaacgaaactgactgcaatcccctggatctgcacaatctgactgtggccgccaccaaagttaatcagaagggctgttatgatctggtgaccagttttatggagactaacatggggatcattgctggagtggcatttggaattgcgttctcccagttgattggcatgctgctggcttgctgtctgtcccggttcatcactgccaatcagtatgagatggtgtaaagagaagtctttcaagaactttggaataagaggcctgtttttaaaaaggaactgccgcaatctctgaaagacttccaaagaacgttagagcacagtacatactatccctgccctgctcccacccccagctccctgcagcccctccccctacgtgcaactgacactcctacccagtcaaagctctgcctttcagcccacgtcatacgtagtgtccatcttgtgaagccctgttgtgccccacagtgtagccaggccccctgcagctagtcatagtgaagcccaccctaaggccctgtgagcgccagctccctcacatgtacttggtccaactgtaggtgactggttatcacatcttcactggcccctgtggccctgcatgtagtaggggaggcttcagtcagcccctcactgtggtccaagaatgccacacacctttccgtagatatgccgatggtaattatcttttcttttggcttaatccgatttggtttggtttttccctttccctggattctttcctaccttcttcaggctgtcaagcacgggagaggagacacagtgggagggattcataaggagaaaacagcgtctggcaggcatggcagaaagtgctgttaagcattagctggcttccttgttcattgttccaagagatgggtgtggagagacggcttagtgtaggatcctctcgaatgaagcctgtgtaatcctgttacaggttgtgttgttacttccctgatttgccccaactacttactattatttcgctttcgttttcctgtatttttttcttgcattgacattattgacgttgaggacctcatcagatcaatttaaaagtgagtgtggaagggaaacgaaagtcaacatatttttaaaagatcttaaaaataatgcctctgtctagcatgccaacaagaatgcattgatattgtgaacatttgtgatacatgtattaataaatagagcaattaaaaatg

SEQ ID NO: 107 - protein, 320 aa, Mus musculus
  Translation initiation factor eIF3-p44
MPTGDFDSKPSWADQVAAEGQDDTCVTSELLTGIPLPTGDTSPEPELLPGDPLPPPKEVPNGNIKTVTEYKIEEDGKKFKIVRTFRISTRKASKAVARRKNWKKFGNSEFDPPGPNVATTTVSDDVSMTFITSKEDLNCQEEEDPMNKLKGQKIVSCRICKGDHWTTRCPYKDTLGPMQKELAEQLGLSTGEKEKLPGELEPVQAAQSKTGKYVPPSLRDGPARRGESMQPNRRADDNATIRVTNLSEDTRETDLQELFRPFGSISRIYLAKDKTTGQSKGFAFISFHRREDAARAIAGVSGFGYDHLILNVEWAKPSTN

SEQ ID NO: 108 - DNA, 1025 bp, Mus musculus
  Translation initiation factor eIF3-p44
ggagttaagacttcgagatgccgactggcgactttgactcgaagcccagctgggccgaccaggtggcggccgagggacaggacgacacatgtgtcaccagcgagctcctgacaggaatccctctgcccaccggggacaccagtccagagcccgagttactgcccggagacccgctgccacctcccaaggaagtacccaatgggaacataaagacagtgactgagtacaagatagaggaagatgggaagaaattcaagattgtcagaaccttcaggatatcgacccggaaggcatcaaaggctgtggcaaggaggaagaattggaagaagtttggcaactcggagtttgacccaccggggcccaatgtggccactaccacagtcagtgatgacgtctctatgacattcatcactagcaaagaggacctaaactgtcaggaggaggaggacccaatgaacaagcttaagggccagaagattgtgtcctgccgcatttgcaagggcgaccattggaccacccgttgcccctacaaggacacactaggacccatgcagaaggagctggctgagcagctcggcctgtctactggggagaaggagaaactgccaggagagctggagcccgtgcaggccgcccagagcaagacagggaagtatgtgccccccagcctccgggacgggccagcccgccgtggggagtccatgcagccaaaccgcagagctgacgacaatgccaccatccgtgtcactaacctgtccgaggacactcgtgagactgacttgcaggaactcttccggcctttcggctccatctcccgaatctacttggccaaggacaagactactgggcagtccaagggttttgcttttatcagctttcaccgccgggaggatgctgcacgtgccattgcaggggtgtctggttttggctacgaccatcttatcctcaatgtcgagtgggccaagccatcaacgaattaataagacatctgctacctgctgctgttgtccagcccctcaggacag

SEQ ID NO: 109 - protein, 391 aa, Mus musculus
  Tumor susceptibility protein TSG101
MAVSESQLKKMMSKYKYRDLTVRQTVNVIAMYKDLKPVLDSYVFNDGSSRELVNLTGTIPVRYRGNIYNIPICLWLLDTYPYNPPICFVKPTSSMTIKTGKHVDANGKIYLPYLHDWKHPRSELLELIQIMIVIFGEEPPVFSRPTVSASYPPYTATGPPNTSYMPGMPSGISAYPSGYPPNPSGYPGCPYPPAGPYPATTSSQYPSQPPVTTVGPSRDGTISEDTIRASLISAVSDKLRWRMKEEMDGAQAELNALKRTEEDLKKGHQKLEEMVTRLDQEVAEVDKNIELLKKKDEELSSALEKMENQSENNDIDEVIIPTAPLYKQILNLYAEENAIEDTIFYLGEALRRGVIDLDVFLKHVRLLSRKQFQLRALMQKARKTAGLSDLY

SEQ ID NO: 110 - DNA, 1450 bp, Mus musculus
  Tumor susceptibility protein TSG101
cccctctgcctgtggggacggaggagcgcgccatggcggtgtccgagagtcagctgaagaagatgatgtccaagtacaaatatagagatctaaccgtccgtcaaactgtcaatgtcatcgctatgtacaaagatctcaaacctgtattggattcatatgtttttaatgatggcagttccagggagctggtgaacctcactggtacaatcccagtgcgttatcgaggtaatatatataatattccaatatgcctgtggctgctggacacatacccatataacccccctatctgttttgttaagcctactagttcaatgactattaaaacaggaaagcatgtggatgcaaatgggaaaatctacctaccttatctacatgactggaaacatccacggtcagagttgctggagcttattcaaatcatgattgtgatatttggagaggagcctccagtgttctcccggcctactgtttctgcatcctacccaccatacacagcaacagggccaccaaatacctcctacatgccaggcatgccaagtggaatctctgcatatccatctggataccctcccaaccccagtggttatcctggctgtccttacccacctgctggcccataccctgccacaacaagctcacagtacccttcccagcctcctgtgaccactgttggtcccagcagagatggcacaatcagtgaggacactatccgtgcatctctcatctcagcagtcagtgacaaactgagatggcggatgaaggaggaaatggatggtgcccaggcagagcttaatgccttgaaacgaacagaggaagatctgaaaaaaggccaccagaaactggaagagatggtcacccgcttagatcaagaagtagctgaagttgataaaaacatagaacttttgaaaaagaaggatgaagaactaagttctgctctggagaaaatggaaaatcaatctgaaaataatgatattgatgaagttatcattcccacagccccactgtataaacagattctaaatctgtatgcagaggaaaatgctattgaagacactatcttttaccttggagaagctttgcggcggggagtcatagacctggatgtgttcctgaaacacgtccgcctcctgtcccgtaaacagttccagctaagggcactaatgcaaaaggcaaggaagactgcgggccttagtgacctctactgacatgtgctgtcagctggagaccgacctctccgtaaagcattcttttcttcttctttttctcatcagtagaacccacaataagttattgcagtttatcattcaagtgttaaatattttgaatcaataatatattttctgtttcctttgggtaaaaactggcttttattaatgcactttctaccctctgtaagcgtctgtgctgtgctgggactgactgggctaaataaaatttgttgcataaa

SEQ ID NO: 111 - protein, 44 aa, Rattus norvegicus
  Thymosin beta-4
MSDKPDMAEIEKFDKSKLKKTETQEKNPLPSKETIEQEKQAGES

SEQ ID NO: 112 - DNA, 686 bp, Rattus norvegicus
  Thymosin beta-4
gcggcctctgagcagatcgtctctccttgttcgcccagctcgctcagctccttccagcaaccatgtctgacaaacccgatatggctgagatcgagaaattcgataagtcgaagttgaagaagacagaaacacaagagaaaaatcctctgccttcaaaagaaacaattgaacaagagaagcaagctggcgaatcgtaatgaggcgagcgccgccaatatgcactgtacattccacgagcattgccttcttattttacttcttttagctgtttaacttcgtaagatgcaaagaggttggatcaagtttaaatgactgtgctgcccctttcacatcaaagaatcagaactactgaccaggaaggcctccccccgcctctcccgcccacctgctggcctggctggcagagagggaaaagaacttgcatgttggtgaaggaaaaagctgggtgggagatggtggaattgagagtaaaataaagatgtcttgcaggatataaaatgcagtttaatcagagtgccatttttttttgttcaaacgattttaattattggaatgcacaatttttttaatatgcaaataaagttttaaaacctgaaaaaaaaaaaaaaaaagaaacaacagtcgttatggccataaaacacatcatctgtgattttggagagaaccactggaaagaaagtttgagg

SEQ ID NO: 113 - protein, 188 aa, Rattus norvegicus
  Ribosomal protein L18
MGVDIRHNKDRKVRRKEPKSQDIYLRLLVKLYRFLARRTNSTFNQVVLKRLFMSRTNRPPLSLSRMIRKMKLPGRENKTAVVVGTITDDVRILEVPKLKVCALRVSSRARSRILKAGGKILTFDQLALESPKGRGTVLLSGPRKGREVYRHFGKAPGTPHSHTKPYVRSKGRKFERARGRRASRGYKN

SEQ ID NO: 114 - DNA, 607 bp, Rattus norvegicus
  Ribosomal protein L18
catgggtgttgacattcgccacaacaaggaccgaaaggttcggcgcaaggagcccaagagccaggatatctacctgcggctgctagtcaagctgtacaggtttctggccagacggaccaactccaccttcaaccaggttgtgctgaaaaggttatttatgagccgaactaaccggccacctctgtccctgtcccgaatgatccggaagatgaagcttcctggtcgggagaacaaaactgctgtggttgtggggacgatcacagatgatgtgcggattctggaagtgcccaagctgaaggtgtgtgcactgagggtgagcagccgggcccgaagtcggatcctcaaggctgggggtaagatcctgaccttcgaccagctggccctggagtctcccaagggcaggggcactgtgctcttgtctggtcctcggaagggccgagaggtgtaccgacactttggcaaggccccaggaactccacacagccacaccaaaccctatgtccgttccaagggccggaagttcgagcgtgccagaggccgaagggccagccgaggctacaaaaactaaccctggctcttactgttaataaaaaagctttggatgttg

SEQ ID NO: 115 - protein, 350 aa, Mus musculus
  AOS1
MVEKEEAGGGGGGGISEEEAAQYDRQIRLWGLEAQKRLRASRVLIVGMKGLGAEIAKNLILAGVKGLTMLDHEQVSPEDPGAQFLIQTGSVGRNRAEASLERAQNLNPMVDVKVDTEDVEKKPESFFTKFDAVCLTCCSRDVIIKVDQICHRNSIKFFTGDVFGYHGYTFANLGEHEFVEEKTKVAKVSQGVEDGPEAKRAKLDSSETTMVKKKVLFCPVKEALEVDWSGEKAKAALKRTAPDYFLLQVLLKFRTDKGRDPTSESYKEDAELLLQIRNDVFDSLGISPDLLPDDFVRYCFSEMAPVCAVVGGILAQEIVKALSQRDPPHNNFFFFDGMKGSGIVECLGPQ

SEQ ID NO: 116 - DNA, 1870 bp, Mus musculus
  AOS1
cgagagcgggagcgggtgagctgaaaccggcgccatggtagagaaggaggaggctggcggcggcggcggcggtggcatcagcgaggaggaggcagcgcagtatgaccgacagatccgcctgtggggactggaggcccagaagcggcttcgagcttcccgggtgctgattgttggcatgaaaggacttggagctgaaattgccaagaatcttatcctggcaggagtcaaagggctcaccatgctggaccacgaacaggtatctccagaagaccctggagctcagttcttgattcagactgggtctgtgggccgcaatagggccgaggcctctttggaacgagcccagaatctcaatcccatggtggatgtaaaggtggacactgaggatgtagagaagaagccagagtccttcttcacgaagtttgatgcggtgtgcctgacttgctgctccagagatgtcatcattaaagtcgaccagatctgtcacagaaacagcattaagttcttcacaggagatgtctttgggtaccatgggtacacctttgcgaatcttggagagcatgaatttgtagaagagaaaaccaaagttgccaaagtaagccaaggagtggaagatggacctgaggccaagagagcaaagcttgattcatcagagacaaccatggtcaaaaagaaagtgcttttttgccctgtaaaagaggcgctagaagtggactggagtggagagaaagccaaggctgccctgaagcgtactgcccccgactactttctgctgcaagtgctgctgaaattccgcacagataaagggagagatccgacttctgagagctacaaggaggatgcggagctgctgctgcagatacggaatgacgtgtttgactccctgggcatcagtcctgacctgcttcccgatgactttgtcaggtactgcttctctgagatggccccagtatgtgctgtggttggagggatcttggcacaggaaattgtgaaggccctgtctcaaagggaccctcctcacaacaacttcttcttcttcgacggcatgaaggggagtggaattgtggagtgccttggtccccagtgagctgaggtgtgtacaaggccaccgagtcacctgccctctctccggatcatttttctagagcaagcaggccagacttcatcctgcctttgtcttcgaagctatcagggaactgcggggtcccaaatttgataatcacgtggcacctctggcattgctcccttgggctgtcactggggactgtcagttcctagtgagagagagcatcatacttcatgatgtcagagtgtcttgtcaccgtttggacttaacttccctctatagtcagcagaggggatctgaggcccagtgctgcctggagaactgagaatagacctctgttgttgacccttcctcaggctggagcctgggtgttggaagggagagactgtcacccagttgtcatgtcttttggttgtgagcctatgcaccttacctttaatggttgaaccatcttttcagcccaaacagtttatttctaaaaagtagatttaatgctaggggccattatgcaggcttgtaatcctagatgttgggatgccggggcaggatttactgtaaatttcagggccaagttggtctacataatgtaccaagaacctttctcaaaatataataaagggcatattccagagttagggtggggcactgttacccagctccttatactgggcacccgggcccctgacaggagtgggttggggggcagttggtttggtcttccttctaggagtatgagggcagcctgtctagtttgtagatccccttggttgctggataaaggatgataataaagtgtgtttctct

SEQ ID NO: 117 - protein, 1762 aa, Rattus norvegicus
  Ankyrin isoform
MASSGTSSPVGAGSPDLEQGDFGSCYSRSSQKSDANASYLRAARAGHLEKALDYIKNGVDVNICNQNGLNALHLASKEGHVEVVSELLQREANVDQPTKKGNTALHIASLAGQAEVVKVLVTNGANVNAQSQNGFTPLYMAAQENHLEVVRFLLDNGASQSLATEDGFTPLAVALQQGHDQVVSLLLENDTKGKVRLPALHIAARKDDTKAAALLLQNDTNADIESKSGFTPLHIAAHYGNINVATLLLNRAAAVDFTARNDITPLHVASKRGNANMVKLLLDRGAKIDAKTRDGLTPLHCGARSGHEQVVEMLLDRAAPILSKTKNGLSPLHMATQGDHLNCVQLLLQHNVPVDDVTNDYLTALHVAAHCGHYKVAKVLLDKKANPNAKALNGFTPLHIACKKNRIRVMELLLKHGASIQAVTESGLTPIHVAAFMGHVNIVSQLMHHGASPNTTNVRGETALHMAARSGQAEVVRYLVQDGAQVEAKAKDEQHPTPHFSRLGKAEIVQQVLQQGASPNAATTSGYTPLHLSAREGHEDVAAFLLDHGAFLSITTKKGFTPLHVAAKYGKLEVASLLLQKSASPDAAGKSGLTPLHVAAHYDNQKVALLLLDQGASPHAAAKNGYTPLHIAAKKNQMDIATSLLEYGADANAVTRQGIASVHLAAQEGHVDMVSLLLSRNANVNLSNKRGLNPLHLGGQEDRVNVAEVLVNQGAHVDAQTKMGYTPLHVGCHYGNIKIVNFLLQHSAKVNAKTKNGYTPLHQAAQQGHTHIINVLLQNNASPNELTVNGNTALAIARRLGYISVVDTLKVVTEEIMTTTTITEKHKMNVPETMNEVLDMSDDEVGKGSAPEKLSHGEYISDGEEGEDAITGDTDKSLGPQDLKELGDDSLPAEGYVGFSLGARSGSLRSFSSDRSYTLNRSSYARDSMMIEELLVPSKEQHLPFTREFDSDSLRHYSWPADTLDNVNLVSSPVHSGFLVSFMVDARGGSMRGSRHHGMRIIIPPRKCTAPTRITCRLVKRHKLANPPPHGGRRGISSRLVEMGPAGAQFLGPVIVEIPHFGSMRGKERELIVLRSENGETWKEHQFDSKNEDLSELLNGMDEELDSPEELGTKRICRIITKDFPQYFAVVSRIKQESNQIGPEGGILSSTTVPLVQASFPEGALTKRIRVGLQAQPVPEETVKKILGNKATFSPIVTVEPRRRKHKPITMTIPITMTIPVPPPSGEGVSNGYKGGNTPSLRFLCRITGGTSPAQWEDITGTTPLTFIKDCVSFTTNVSARFWLADCHQVLETVGLASQLYRELICVPYMAKFVVFAKTNDPVEAALRCFCMTDDRVDKTLEQQENFEEVARSKDIEVLEGKPIYVDCYGNLAPLTKGGQQLVFNFYSFKENRLPFSIKVRDTSQEPCAVCLFLKEPKTTKGLPQTAVCNLNITLPAHKKAEKADRRQSFTSLALRKRYSYLTEPSMSPQSPCERTDIRMAIVADHLGLSWTELARELNFSVDEINQIRVENPNSLISQSFMLLKKWVTRDGKNATTDALTSVLTKINRIDIVTLLEGPIFDYGNISGTRSFADENNVFHDPVDGWQNETPSGSLESPAQARRITGGLLDRLDDRSDQVRDPITSYLTGEAGKFEANGNHAEVIPEAKAKAYFPESQNDIGKQSIKENLKPKTHGCGRAEEPVSPLTGYQKSLEETSKLVIEDAPKPCVPVGMKKMTRTPADGKARLNLQEEEGSARSEPKQGEGYKVKTKKEIRNVEKKAH

SEQ ID NO: 118 - DNA, 6207 bp, Rattus norvegicus
  Ankyrin isoform
cacgagcggatcccgggttgaggagacgccgacccgggcgcagagccgagttcctggaaggaggagcgcgcgggaccccaccgtatggccagctccggcacttcgtccccagtgggcgcggggagccccgatcttgagcagggtgactttggatcctgttattcacgaagctctcaaaagtcggatgccaatgcaagttacttgagagcagctcgggcggggcacctggaaaaggcccttgactacatcaaaaatggagtggacgtcaacatctgtaaccagaatgggttgaatgcgctccatcttgcttccaaagaagggcatgtggaagtggtctccgagctgctgcagagagaagccaacgtcgatcagccaacaaagaaaggaaacacagccttacacatcgcatccttggctggacaagcggaagtggtcaaggtcttggttacgaacggagcgaacgtcaacgcacagtctcagaatggcttcacgccgctgtatatggcggcccaggagaaccacctggaagtcgtcaggtttcttctggacaatggtgccagccaaagcctggctacagaggatggcttcacgccattggccgtggctcttcaacaaggtcacgaccaagtcgtatccctcctgctcgagaacgacacgaagggaaaagtgcgcctcccagccctccacatcgcggcccggaaagatgacaccaaagcggcagctctgctcctacagaacgacaccaatgcagacatagagtcaaagagtggcttcaccccactccacatagctgcccactacgggaatatcaatgtggccacgttgctgttaaaccgagcggctgccgtggacttcaccgcacggaatgacatcactcctttgcatgttgcctcgaaacggggaaacgcaaatatggtaaagctgttgctcgaccggggtgcgaagatcgacgccaagaccagggacggtctgaccccgctgcactgcggggcgagaagtggccacgaacaggtggtagagatgttgctggacagagccgcccccatcctttcgaaaaccaagaatggactgtccccactgcacatggccacacaaggagaccatttaaactgcgtccaactcctcctccagcacaacgtgcccgtggatgacgtcaccaacgactacctgaccgccctccacgtggcggcccactgcgggcattacaaagttgccaaggttcttttggataagaaagctaaccccaatgccaaagctctgaatggcttcacccccctccatatcgcctgcaaaaagaaccgaatccgagtaatggaactccttttgaagcacggtgcatctattcaagccgtaaccgagtcgggccttaccccaatccatgtcgctgccttcatgggacatgtaaatatcgtgtcacagctaatgcatcatggagcctccccaaacaccaccaacgtgagaggagaaacagcattgcatatggcggctcggtcggggcaagcagaagtggtgcggtatttggtacaagatggagctcaggtagaagcaaaagctaaggatgagcaacaccccactccacatttcagccgactcgggaaggctgagatagtgcaacaagtcttacagcaaggagcgtccccgaatgcagcaacaacttccgggtacaccccccttcacctttcggccagagaggggcatgaggatgtagctgccttccttctggaccatggagcattcttatccataacaacaaagaagggattcacgcctctgcatgtggctgcaaagtatgggaagcttgaagtggcaagtctcctgctgcagaagagtgcgtctcctgatgccgctgggaagagcgggctaactccactgcatgtagcagcacattacgataatcagaaagtggcccttctgcttttggaccagggagcctcaccccacgcagctgcaaagaacggttatacgccactgcacatcgccgccaagaagaaccagatggacatagccacgtccctgctggagtacggtgctgatgcaaacgccgttacccggcaagggattgcgtccgtccaccttgcagcgcaggaagggcacgtggacatggtgtcgctgctcctcagtagaaatgcgaacgtcaacttgagcaataagaggggcctcaacccactccacctggggggtcaagaagaccgagtgaacgtggctgaggtccttgtcaaccaaggggcccacgtggatgcacagacaaagatgggctacacgccgctccatgtgggctgtcactatggaaacatcaaaatagtcaattttctgctgcagcattctgcgaaagttaatgccaagacaaagaatggatacacgccactgcaccaggcagcccagcaggggcacacacacatcatcaacgtcctgctccagaacaacgcttcccccaatgaactcactgtgaatgggaacacagccctggccatcgcccgacgccttggctacatctcggtggttgacaccctaaaggtcgtgacagaggaaattatgaccaccactaccatcacggagaagcacaaaatgaatgtcccagaaacaatgaatgaagtcctcgacatgtcagacgatgaagttggtaaaggcagcgcccccgaaaagctcagtcatggggaatatatctcagatggtgaagaaggtgaagatgccatcacaggggacactgacaaatctctcggcccacaggacctcaaggagctgggcgatgactccctgcctgccgagggctatgtgggcttcagtctcggagcccgttctggcagtcttcgctccttcagttcggataggtcctacaccctgaacagaagctcctatgcgcgggacagcatgatgatcgaggagcttctggtgccatccaaagagcagcacctcccattcacgagggagtttgactccgactccctcagacactacagttggccagcagacacactggacaatgtgaacctggtctccagccctgtgcattctgggtttctggttagctttatggtggacgcgagagggggctccatgcgaggaagccgccaccacgggatgcggatcatcatccctccccgcaagtgtacggcccccacccgcatcacttgccgcctggtaaagagacataaactggccaacccacccccccatggtggaaggagagggattagcagtaggctggtagaaatgggtcctgcgggggcacaatttttaggcccggtcatagtggaaatccctcattttgggtccatgagaggaaaggagagggaactcattgtcctccggagcgagaacggagagacctggaaggaacaccagtttgacagcaaaaacgaagacctctcggagctcctcaatggcatggacgaagaacttgacagcccagaagagttgggcacaaagcgcatctgcagaatcatcacgaaggatttcccccagtatttcgctgtggtttcccggattaagcaggaaagcaaccagattggtcccgaaggtgggattctgagcagcaccacggtccccctcgtccaggcgtctttcccagagggtgccttaaccaaaaggatccgtgtgggtctgcaggctcagcccgtaccagaggagactgtgaaaaagatccttggaaacaaagcaacgtttagcccaattgtcacggtggagccgaggaggaggaaacataagccgatcaccatgaccatcccgatcaccatgaccatcccggtgcccccaccctcgggagaaggggtgtccaatgggtacaaagggggaaacacgcccagcctgcgattcctctgcaggattacaggagggacttccccggctcagtgggaagacatcacaggcacaacccctctgaccttcataaaggactgtgtgtctttcacaaccaatgtttcagccaggttctggctggcggactgccatcaggtgttagaaaccgtaggcttagcctcgcagctgtacagagagttgatatgtgtcccttacatggccaagtttgttgtttttgccaaaacaaacgaccccgtggaagccgccctaaggtgcttctgtatgacagacgacagagtggacaaaaccctggaacagcaggagaatttcgaggaggttgccagaagcaaagacatcgaggttctggaaggaaagcccatctatgttgattgctatggaaacctggctcctctgaccaaaggagggcagcagcttgtttttaacttctattctttcaaagaaaacagactgccattttccatcaaggttagagacaccagccaagagccctgcgccgtctgtcttttcctgaaggagccgaaaacaacaaaaggattaccccaaacggctgtttgcaacttaaatattactctaccggcgcataaaaaggctgagaaggcagacagacgccagagcttcacatccctagccttacgtaagcgctacagctacttgactgagcccagcatgagtccgcagagtccttgtgagcggacggatatcaggatggcaatagtagccgatcacctgggacttagttggacagagctggcaagggaactgaatttttcagtggatgaaatcaaccaaatacgagtggaaaatcccaattctttaatttctcagagcttcatgttattaaaaaagtgggtgacgagagacgggaagaatgccacaactgatgccttaacttcggtcttaacaaaaattaaccgaatagacatagtaactctgctggaaggaccaatatttgattatgggaatatttcaggcaccagaagctttgcagatgaaaacaatgttttccatgacccagttgatggttggcagaacgagacgccaagtggaagcctagagtccccggcgcaagcgcgaagaatcaccggtgggttactggaccgtctggacgacaggtctgaccaggttcgggatcccattacctcatacctcacaggagaagctgggaagttcgaagcaaacggaaaccacgcagaagtcattccagaagcaaaggccaaggcctactttcctgaatcccaaaacgatatagggaaacagagcatcaaggagaacttgaaaccaaaaacacacggatgtggtcgcgctgaggaaccagtgtcacccctcacaggctaccagaaatctctggaagaaaccagcaagcttgtcatagaagacgcacctaaaccctgtgtgcctgtcggcatgaaaaagatgaccaggactccggctgacggcaaagccaggctcaacctccaggaagaggaggggtccgccaggtcagagcctaagcagggagaaggctataaggtgaaaacaaagaaggaaatccggaatgtggagaagaaagcccactagtgacggtgacgtcagtccaggaccacgcgttcgtactgccagtattgagaaactcaccagagatcagcagggaggagaatctctagcaagagcggagtgtggatctgccaccccacacatcagtgacatgtttggggttttgggtttttttggtttttttttttaatgcagaaggataaagaaaatcaccttttttttatttagcatgagccaatttacagagcatggagactcactttcattcccggcgctgacacgcgtgcactaagcaagtgcaatgtaagatacaagaagccatgttgttcagactcagcctcaagtaatttggtgtcactttcggagaaggacagacaaccaacgacacctgtgccaccggaaggaggggggccagcaccaagtggagcggtcccaatccaggaagacacccttgaaattactaaaacccaccacaagctcgccttatttttcttggacccaaactaactgtcagggtataaacactgtttgtttcttttttttttttaaaagtttaaataataataagagaaatcaatagttttgctgtaaataataacactgtaaattctaacagaagaaactacaataaagaattataaggcacctgcctcacggaacacaaagataccacaaacgcgtccaatgacaggcgtaccaagtggcctcaccctggacaaggacgggaatctggcgcgtgcgggacgctctctcactgactcctgtatattagcaattatgatgtttgtacacgccaaactgctggcttggttttaaaaagaaaatgcaaatctttaaaaaaaaaaaaaaaaaaaaaaa

SEQ ID NO: 119 - protein, 393 aa, Rattus norvegicus
  Zygin 1
MEAPLVSLDEEFEDIRPCCTEDPEEKPQSLYGTSPHHLEDPSLSELENFSSEIISFKSMEDLVNEFDEKLNVCFRNYNAKTENLAPVKNQLQIQEEEETLRDEEVWDALTDNYIPSLSEDWRDPNIEALNGNSSDTEIHEKEEEDEFIEKSENDSGINEEPLLTADQVIEEIEEMMQNSPDPEEEVEVLEEEDGGEISSQADSVLLQEMQALTQTFNNNWSYEGLRHMSGSELTELLDQVEGAIRDFSEELVHQLARRDELEFEKEVKNSFITVLIEVQNKQKEQRELMKKRRKEKGLSLQSSRIEKGNQMPLKRFSMEGISNILQSGIRQTFGSSGADRQYLNTVIPYEKKSSPPSVEDLQMLTNILFAMKEDNEKVPTLLTDYILKVLCPT

SEQ ID NO: 120 - DNA, 1697 bp, Rattus norvegicus
  Zygin 1
tagctggcttgcccgctgccgttgcactgcaccgggccacctctagccggtggatggggatgtctggctgaaccccgggatccgattccctcctccaggacctgctcagggaaacggatcttgacagttgccatcattgtactacggtgccaggatggaggctccactggtgagtctggatgaagagtttgaagatatcaggccctgctgcactgaggacccagaggaaaagccacaaagtctctatggcacatctcctcaccacctggaggacccttccctctccgagcttgagaatttttcttccgaaataatcagcttcaagtccatggaggacctcgtgaatgaatttgatgagaagctcaatgtctgctttcggaactacaatgccaagaccgagaacctggctccagtgaagaaccagttgcagatccaggaggaggaggagactcttcgggatgaggaggtttgggatgctctgacagacaattacatcccttcactctcagaagactggagggacccaaacattgaagctctgaatggcaacagctctgacactgagatccacgagaaggaagaagaagatgagttcattgagaagagtgaaaacgactctggtatcaacgaggagcctctcctcacagctgaccaggtgattgaggagatcgaagaaatgatgcagaactccccagatcctgaggaggaagtggaggtgctggaagaggaggatggaggagaaatctcgtctcaggcagattcagtcctgctacaagagatgcaggccctgacgcagaccttcaacaacaactggtcctatgaagggctgagacacatgtctgggtctgagctgacagagctgctggaccaggtggagggtgccatccgtgacttctcggaggagctggtccaccagctggcccgcagagatgagctggagtttgagaaggaagtgaagaactctttcatcacggtgctcattgaggttcagaataagcagaaggagcagcgggaactgatgaagaagaggcggaaagagaaggggttaagcctgcagagcagtcggatagagaaggggaaccagatgcctctcaagcgtttcagcatggagggcatctccaacatcctgcagagtggcatccgccagacctttggctcctcaggagctgacagacagtacctgaacacagtcatcccttatgagaagaaatcttctcctccctctgtggaagacctgcagatgctgacaaacattctcttcgccatgaaggaggataacgagaaggtgcctactttgctaacggactacattttaaaagtgctctgtccaacctaacctcacctttggagcagcctcactgcaggaggtcactgagcaagaaagtcattccatcactgggattgcatgacaccacgtaacctccggcgtgtatttaaacgtgtatagcttaacctggattaaacatgagcaaccgcgcacgcgcggggtcctttgctgttggcttctagtgctagtaatcattggatgcatgatcgggcgtagggccagtgactctgctccctctaacctgtgttggggaagacaggtgccctcaccactcattatgtagtctggctccagccctcaacccagcttatactcttcagactaattttgaaataaaccttcatttaattaatatcaaaaaaaaaaaaaa

SEQ ID NO: 121 - protein, 226 aa, Rattus norvegicus
  PrP
GGWNTGGSRYPGQGSPGGNRYPPQSGGTWGQPHGGGWGQPHGGGWGQPHGGGWGQPHGGGWSQGGGTHNQWNKPSKPKTNLKHVAGAAAAGAVVGGLGGYMLGSAMSRPMLHFGNDWEDRYYRENMYRYPNQVYYRPVDQYSNQNNFVHDCVNITIKQHTVTTTTKGENFTETDVKMMERVVEQMCVTQYQKESQAYYDGRRSSAVLFSSPPVILLISFLIFLIVG

SEQ ID NO: 122 - DNA, 1733 bp, Rattus norvegicus
  PrP
ggagggtggaacactggtggaagccggtaccctgggcagggaagccctggaggcaaccgttacccacctcagagtggtggtacctgggggcagccccatggtggtggctggggacaacctcatggtggtggctggggacaacctcatggtggtggctggggtcagccccatggcgggggctggagtcaaggagggggtacccataatcagtggaacaagcccagcaagccaaaaaccaacctcaagcatgtggcaggggctgccgcagctggggcagtagtggggggccttggtggctacatgttggggagtgccatgagcaggcccatgctccattttggcaacgactgggaggaccgctactaccgagaaaacatgtaccgttaccctaaccaagtgtactacaggccggtggatcagtacagcaaccagaacaacttcgtgcacgactgtgtcaatatcaccatcaagcagcatacagtcaccaccaccaccaagggggagaacttcacggagaccgacgtgaagatgatggagcgtgtggtggagcagatgtgcgtcacccagtatcagaaggagtcccaggcctattacgacgggagaagatctagcgccgtgcttttctcctcccctcctgtgatcctcctcatctccttcctcatcttcctgatcgtgggatgaggaggccttcctgcttgttccttctcattctcgtggtctaggctgggggaggggttacccacctgtagctctttcaattgaggtggtgtctcattcttgcttctctttgtccactattctaatacccttggcagtgatgggtctggggaaatgtacagtagaccagatgctattcgcttcagcgtcctttgattgagtccatcatgggccaggttaacaccaggccagtaagaatataacaccaaataactgctggctagtcagggctttgttttggtctactgagtaaatactgtgtaacccctgaatttgtacccagaggacatggtgacagagacacacataacttagtataggcaaaggggtctatagccaaagaagcactgtgtgggcatggcaccctggataacagcctcccgcctgggatatctagagcatcacatgtgaattctttcttttctaacataaaccatagctgattgaaggcaacaagaaaaagaatcaaattatcctactgacattgaaagcaaactatgttcattccctaggcgctggaatgatttttagccttggattaaaccaggagattttgactctgaggagaaccagcagtacaaaagcatggtctcctgtgatgggagagatggtgaggggacaaaggcaagacccctgcgtttcttcatttctgtctcataattatcaagagctagaattaggtcgtgtctcataattatcaagagctagaattaggtcgtgtgccctaagtttctgtactcgtatttgaactggacaacaaagagacaatctacaaattctcttgggctgcagaggagagaaataggctccattccaaagtggaaagagaaattctgctagcattgtctaagtaaggctaacttttccttaaatcgctttgtatttcccccagcagacatcacaaccctgtgatcggttcagcctgcaccgcgggtgttctgtgtagaatatataaatataacttcaagcttaggccttctattttaaaacatctgaagtgtggaacgcactggccc

SEQ ID NO: 123 - protein, 266 aa, Rattus rattus [sequence omitted]

SEQ ID NO: 124 - DNA, 851 bp, Rattus rattus
  Ribosomal protein L7a
cgagcggatgcccaaaggaaagaaggccaaggggaagaaggtggccccggcccccgccgtggtcaagaaacaagaggccaaaaaggtggtcaatcctttgtttgagaaaaggcctaagaacttcggcattgggcaggacatccagcccaaaagagatctcacgcgcttcgtcaaatggccccgctacatcaggctgcagcggcaaagagccatcctctataagcggctcaaagtacctcctgccatcaaccagttcacccaggccctggacaggcaaacagcgactcagctgcttaagcttgcccacaagtacaggccagagacaaagcaggagaagaagcagaggctgctggcccgcgctgagaagaaagctgctggcaaaggggacgtcccaactaagagaccacctgtcctccgagcaggggtcaatacagtcaccactttggtggagaacaagaaggctcagctggtggtgattgcccatgatgtagaccccattgagctggtggttttcctgcctgccctgtgtcgaaagatgggggtgccctactgcatcatcaagggaaaggccaggctggggcgcctggtccacaggaagacatgcaccactgttgccttcacacaggtgaactcggaagacaagggtgctctggctaagctggtggaagctattaggaccaattataatgacagatatgacgagatccgccgccactggggaggcaacgtcctgggtcctaagtctgtggctcgcattgccaagctggaaaaggcaaaggctaaagaactcgccactaagctgggttaaatgtacacttaagttttctgtacataaatataattacaaagtt

SEQ ID NO: 125 - protein, 472 aa, Rattus norvegicus
  Type 1 astrocyte and olefactory-limbic associated protein
MDYGTSLSADLSLNKETGSLSLKGSKLHNKTLKRTRRFVVDGVEVSITTSKIISEDEKKDEEMRFLRRQELRELRLLQKEEHRNQTQLSTKHELQLEQMHRRFEQEINAKKKFYDVELENLERQQKQQVEKMEQDHSVRRREEAKRIRLEQDRDYARFQEQLKQMKKEVKNEVEKLPRQQRKESMKQKMEEHAQKKQLLDRDFVAKQKEDLELAMKKLTAENRREICDKERDCLNKKQELLRDREAALWEMEEHQLQERHQLVKQQLKDQYFLQRHDLLRKHEKEREQMQRYNQRMMEQLKVRQQQEKARLPKIQRSDGKTRMAMYKKSLHINGAGSASEQREKVKQFSQQEEKRQKAERLQQQQKHENQMRDMVAQCESNMNELQQLQNEKCHLLVEHETQKLKALDESHNQSLKEWRDKLRPRKKALEEDLNQKKREQEMFFRLSEEAETRPTTPNRASKFFPYSSGDAS

SEQ ID NO: 126 - DNA, 4301 bp, Rattus norvegicus
  Type 1 astrocyte and olefactory-limbic associated protein
ggcacgagaagtcggaccctcccaccctgctcacaccctccaagtggtccacggagttccgagactttctgaagatagccttggataagaacccagaaacccggcccagtgctgcgcagctgctgcagcatcccttcgtcagtacagtcaccagtaataaggcccttcgggagctggtggctgaggcgaaggctgaggtgatggaggagatcgaggacggcaaggaggacggcagggaggacggcagggaggatgggaaagaggaggattgagacgagaaggatgctgtgagtgctgttccgcccccagtcaaccacactcaggactcctctgccaatggaactcagccaagcctcaactctgacaagcttctccaggattcttctacccccctgcctcccagccagcctcaggagcctgtgaacgggccctgtaaccaaccctcaggggatggatccccccagaacaccagccctgcagatgaggtctccaagaatgacaatggcttaaaggtacctgttcccctccggaagtcccggccattgtccgtggatgccagaattcaggtgaccgaagagaaacaaatcactgaccaggctgagaaccccagttctgcagccagcaaacccccgaaggtcaaccagagccgacctaacagcagcgccctggagactttgggtgtcgagactctggccaatggaggcctggagctccctggctctgtaactccaaaccattctaagagggcgtcggactgtagcaacctgtctacctcagagagcatggactacggcacctccttgtctgctgacctgtcattgaacaaagagacgggctcattgtctctcaagggctcaaaactgcacaacaagaccctgaagaggacccgccggtttgtggtggacggtgtggaggtgagcatcaccacctccaagatcatcagcgaagacgagaagaaagacgaggagatgaggtttctcaggcgccaggaactccgagagcttcggctcctgcagaaagaagagcatcggaaccagacgcagctgagcaccaagcacgagctgcagctggagcagatgcacagacgatttgaacaagaaatcaacgccaagaagaaattctatgacgtggagctagagaacctggagcggcagcagaagcagcaggtggagaagatggagcaggaccacagcgtgcgtcgcagagaggaggccaagcggatccgcctggagcaggatcgagactacgccaggttccaagagcagctcaagcagatgaagaaggaggtgaagaatgaggttgagaaactgccccggcaacagcggaaggagagcatgaagcagaagatggaggagcacgcacagaagaaacaactgctggaccgagactttgtagccaagcagaaggaagacctggagctggccatgaagaagctcacggcagaaaacaggcgtgagatctgtgacaaggaacgtgattgccttaacaagaagcaggagctcctccgagaccgagaggcagccctgtgggagatggaggagcaccagttacaggagagacatcagctggtgaagcagcagcttaaggaccagtacttcctgcagcggcatgacctgctgcgcaagcacgagaaggagcgggagcagatgcagcgctacaaccagcgtatgatggagcagctgaaggtcagacagcagcaggagaaggcgcggctacccaagatccagaggagtgacggcaagacccgcatggccatgtacaagaagagcctgcacatcaatggtgcgggcagtgcctccgagcagcgggagaaggtcaagcagttctcccagcaggaagagaagaggcagaaggcggagaggctgcagcagcagcagaaacacgagaaccagatgcgagacatggtggcacagtgcgagagcaacatgaacgagctgcagcagctgcagaatgaaaagtgtcatctgttagtggagcatgaaacccagaagctgaaggccctggacgagagccataaccagagcctgaaggaatggcgagacaagcttcggccacgcaaaaaggccctggaagaggatttgaaccagaagaagcgggaacaggaaatgttcttcagactaagtgaggaggcagagaccagacccaccacacccaacagagccagcaagttcttcccctacagctctggggatgcttcctaacacacacatgcctgggctgcggtgcggcagtacagccaccagggccaccaaccctctacaaacaagtgactcaggacctcttcctcttgcttctgtgccagctccaactacccagcaccccagttgcccacagcaccaccccagtgcttctgatggatgacctcatcccaactcagattcccatcacctggaagtgacctgggctgttggggtccgggaccgagcgggatgggcgtacccctcctgtttgccaaaacaccagctctactgtctgtgggcacaagcgctactgatgacatcaccacgaacccatccttattgtgatccttgtggttttttcttctccttcagtaattcctcacagtgttggaaaacatccctcagagccattttgcttctcagcagccagctctcaggggtgtccccattaccctgcttcgcacagctgactttgtgctcgatgagacgctgtgtatgtgggggtagggagtggggaaagggaggccagaaatgttcattctgctggtttctgacattttatgccatctcattttgcctctccctgtcacacacacacacacacacacacacacacacacacacacacacacacacacaatgcaaacacacaacttggccctcctgaacctgatcgtaggacacggagtacagagcatgtcaggtggagcagctgctggggcatgctgagtgctggccccaaagcccagagaaggcacaggctgtactgcagcctgcctgccactcgtttggctgcacacaggatcctgtgttcaggggtaaactcccctccacacttgtcttctgctgcctagcgcatgccaatctcgcccttgcccagttgttggcaagtactggggaaggctcctgacctttgacctttgccccagtcctgcactggagtcccactgtacatttccactaagccggacagtcctttggacttctctgtttaggaagagatgcttcccacccctgggaacagccgaagctcaggaaaatgccaagcctcgtgcctgggcctttgggttgctcaggtagcctcccaagatgctgcgccccataggctaccatgcccagaaaagcagctggtcggcccagccggcgttcgctgatagcgccttagggctcagttaaagcacaggtaaatggctggctgctttgtataccctccttttagacagcatcaccccagggattaggatgggatgggtgggggcggggcacccaggcagtggagtctgggagtggctgagacctcagcagtatttccccatcactgccccatgctgagacaaccttctaggacgtttcctcagatgctgactgggtgcttgggaggggagtgggctagtaaaacaaaataggaaaacaggtcttgggactcccagatcttgtgtgcagtaaggaagttcacagagccccaggaaggcgatagttctcagggtagcgagcgtcagcttgctttcaggccgcacaccgaggagtcttgaggaacagttgacttctttcttactggtgcatgggggctgggaaacacaagttgtcagagtgcagctgtgggactcagagatgggaagtgggcaaggccacgccctgcagggctctaccattgtttacaatgtacttggctgcattcgggggtggggggaacttgacagtggctattaggcaaaatgccggttttgtggttcaggtaacagtctttgaccactccctgacgtcattcgtactgtcctcctccttgttgcttccacacttagtcccacctgagctctggtacctctgctgtgccttttttgagtggggtctagccttgtcttccagcctcataatttaacctaagtgcaatgcctgccaccgacaaaggcccgtgaagtattcctcatgtcctgtgctaacgttttctgtataggaacaggcagaaatgtctttagcaccgcggatataactaacttatatttcccttcacgaaggatagaagtaacgggtgtgtcatttccaacggtcatgtataatttttgtaaactgttctctgcaaacaaaaaaaatgtaaatatgcttctaataaaataataaggt

SEQ ID NO: 127 - protein, 267 aa, Rattus norvegicus
  C1-13 protein
MDCVWSNWKSQAIDLLYWRDIKQTGIVFGSFLLLLFSLTQFSVVSVVAYLALAALSATISFRIYKSVLQAVQKTDEGHPFKAYLELEITLSQEQIQKYTDCLQLYVNSTLKELRRLFLVQDLVDSLKFAVLMWLLTYVGALFNGLTLLLMAVVSMFTLPVVYVKHQAQVDQYLGLVRTHINTVVAKIQAKIPGARGMLSRWLPQEKPDMNGGVWSGNSSLLPRYCELIVSLPQYHNLRGKLRDRCFQSFPVLLGYLSPPRPLSSTKV

SEQ ID NO: 128 - DNA, 1473 bp, Rattus norvegicus
  C1-13 protein
cccaccgccgccgcagccgggcagcgacgcagagtgcaagctcagcgactggaggagagccacgagcccgccaagcccgcaccatgcagccactgccgattccaccaagatggactgtgtgtggagcaactggaaaagtcaggctattgaccttctgtactggcgggacatcaagcagacggggattgtgttcgggagcttcctgctgctgctcttctccctgacccagttcagcgttgtgagcgtcgtcgcctacctggccctggctgccctctctgccaccatcagcttccgcatctacaagtccgttctacaagctgtgcagaaaacagatgagggtcaccctttcaaggcctacctggagctggagatcaccctgtcccaggagcagatccagaagtacacagactgcctgcagctatacgtgaacagcactctgaaggagctacggaggctcttccttgtccaagacctagtggattccttaaaatttgcagtcctcatgtggctcctgacctacgttggcgcactcttcaatggcctgaccctgctgcttatggctgtggtttcgatgtttactctacctgtggtatatgttaagcaccaggcacaggttgaccaatatctgggacttgtgaggactcacataaacaccgttgtggcaaagatccaggctaaaatccccggcgcaagaggcatgctgagtagatggttgccccaggagaagccggacatgaatgggggtgtctggagtggtaacagctctctccttcctcgttactgcgaattgattgtttcccttccccagtaccataatcttagaggcaaacttcgagacaggtgttttcagtcttttcctgtactcttaggatatttgagtcccccccgccccttgtcaagcactaaagtatagagtgtgttagatgtggtttttaattttgtgttgctaaaaaaaaaaaaagtgcatgatggtgagagctcacgttctccttcgtcccttgctgtcctccccctgcaatgcttctgtggcttctactgtccctgtggctaggcccttcttgccaagtgcgctgacacatagtgggtcgcttatcatgtccttgggttgctggttggattcatctctaataacactatatagaatcataggccaatgttttagcattttacccccccacacacagaacataaaaattaatataaaacagttgaccgtgtatatggtgatccgttttgtataactaagaatgatcgaattaaagaataaatccaaaaatgaacgcacagtacttttattgtatgggatgcctgggctgatttacatgtatggtaactaaagtgccagcatgttgactttattacgatttgtatttcttcctctgtagttcctaacggactcaatcacagactctgggtatttgcacttatgtacttgatactagaatgcaccaataaatgtgactcaaatgtaaa

SEQ ID NO: 129 - protein, 591 aa, Rattus rattus
  Calnexin
MEGKWLLCLLLVLGTAAIQAHDGHDDDMIDIEDDLDDVIEEVEDSKSKSDTSTPPSPKVTYKAPVPTGEVYFADSFDRGSLSGWILSKAKKDDTDDEIAKYDGKWEVDEMKETKLPGDKGLVLMSRAKHHAISAKLNKPFLFDTKPLIVQYEVNFQNGIECGGAYVKLLSKTSELNLDQFHDKTPYTIMFGPDKCGEDYKLHFIFRHKNPKTGVYEEKHAKRPDADLKTYFTDKKTHLYTLILNPDNSFEILVDQSVVNSGNLLNDMTPPVNPSREIEDPEDRKPEDWDERPKIADPDAVKPDDWDEDAPSKIPDEEATKPEGWLDDEPEYIPDPDAEKPEDWDEDMDGEWEAPQIANPKCESAPGCGVWQRPMIDNPNYKGKWKPPMIDNPNYQGIWKPRKIPNPDFFEDLEPFRMTPFSAIGLELWSMTSDIFFDNFIISGDRRVVDDWANDGWGLKKAADGAAEPGVVGQMLEAAEERPWLWVVYILTVALPVFLVILFCCSGKKQSNAMEYKKTDAPQPDVKDEEGKEEEKNKGDEEEEEEKLEEKQKSDAEEDGGTGSQDEEDSKPKAEEDEILNRSPRNRKPRRE

SEQ ID NO: 130 - DNA, 1776 bp, Rattus rattus
  Calnexin
atggaagggaagtggttactgtgtttgctactggtccttggaactgcagctattcaggctcatgatggacatgatgatgacatgattgatattgaagatgatcttgatgatgttatcgaagaggtagaagattcaaaatctaaatcagataccagcactcctccatctccaaaggtcacctacaaagctccagttccaacaggggaggtttattttgctgactcctttgacagagggtctctgtcagggtggattttatctaaagccaaaaaagacgacactgatgatgaaattgccaaatatgacggaaagtgggaggtagatgaaatgaaggaaacaaagcttccaggtgataaaggacttgtattgatgtctcgggccaagcatcatgccatctctgctaaactgaacaagcccttcctgtttgataccaagcctctcattgttcagtatgaggttaactttcagaatggaatagaatgcggtggtgcctacgtgaagctgctatccaagacctcagaactcaacctggatcaattccacgacaagactccgtatactattatgtttggtccagataaatgtggagaggactacaaactgcatttcatctttcgccacaaaaaccccaagacaggcgtatatgaagaaaaacatgctaagaggccagatgcagatctgaagacctatttcactgacaagaaaacacatctttacacattaatcttgaatccagacaatagttttgaaatattagttgaccagtctgttgtgaacagtggaaacctgctaaatgacatgacccctccggtaaacccttcacgtgaaattgaggacccagaagaccggaagcctgaagattgggatgaaaggcccaaaatagcagatccagatgctgtcaagccagatgactgggatgaagatgccccttctaagattccagatgaagaggccacaaagcctgaaggctggttagatgatgaacccgagtatattccagaccctgatgcagagaaaccagaagattgggatgaggatatggacggagaatgggaggctcctcagattgccaaccctaagtgtgagtccgcccctgggtgtggtgtctggcagcgacctatgattgacaaccccaattataagggcaaatggaagcctcctatgattgacaatcctaactaccagggaatctggaaaccaaggaaaataccaaatccagatttctttgaagacctggaaccttttaggatgactcctttcagcgctattggtttggagctctggtccatgacatccgacatcttttttgacaactttatcattagtggtgaccgaagagtagttgatgactgggccaatgatgggtggggcctgaagaaagctgctgatggggctgcagagccaggtgtagtggggcagatgctggaggcagctgaagagcgtccatggctttgggtggtctacattctgactgtagcgttgccagtgttccttgtgatcctcttctgctgttctggaaagaaacagtccaatgctatggagtacaagaagacagatgctccccagccagatgtgaaggacgaagaagggaaggaagaagagaagaacaagggagatgaagaggaagaagaggagaagcttgaagagaaacagaagagtgatgctgaagaagatggtggcactggcagtcaagatgaggaagatagcaagcctaaagcagaggaggatgaaattttgaacagatcaccaagaaacagaaagccacgaagagagtga

SEQ ID NO: 131 - protein, 269 aa, Rattus norvegicus
  Preproenkephalin
MAQFLRLCIWLVALGSCLLATVQADCSQDCAKCSYRLVRPGDINFLACTLECEGQLPSFKIWETCKDLLQVSKPEFPWDNIDMYKDSSKQDESHLLAKKYGGFMKRYGGFMKKMDELYPVEPEEEANGGEILAKRYGGFMKKDADEGDTLANSSDLLKELLGTGDNRAKDSHQQESTNNDEDSTSKRYGGFMRGLKRSPQLEDEAKELQKRYGGFMRRVGRPEWWMDYQKRYGGFLKRFAESLPSDEEGESYSKEVPEMEKRYGGFMRF

SEQ ID NO: 132 - DNA, 1446 bp, Rattus norvegicus
  Preproenkephalin
ctcggaaggacaggatgccatgccatcgggaagacaggactccccaaggagaacaggatgccatcagggagacaggactcccccgtggaagataggatacctccaggaagacagaatgccccccaggcagccctgggacagcgggaaacactagggaccaagctatccctggttcactcgggattttgttgggttgtgggcggggctcaggaaagattgtccctgctggtcctgctccacgaccacccacccggcaaggttccctcctagagaaccttgtcagagacagaacgggtccccacaggcgcattcttctttccaacacccatggcgcagttcctgagactttgcatctggctcgtagcgcttgggtcctgcctcctggctacagtgcaggcagactgcagccaggactgcgctaaatgcagctaccgcctggtacgtcccggcgacatcaacttcctggcatgcacactcgaatgtgaagggcagctgccttctttcaaaatctgggagacctgcaaggatctcctgcaggtgtccaagcccgagttcccttgggataacatcgacatgtacaaagacagcagcaaacaggatgagagccacttgctagccaagaagtatggagggttcatgaaacggtatggaggcttcatgaagaagatggatgagctttaccccgtggagccagaagaagaggccaatggaggcgagatccttgccaagaggtatggcggtttcatgaagaaggatgcagatgagggagacaccttggccaactcctccgacctgctgaaagagctactgggaacaggagacaaccgtgcgaaagatagccaccaacaggaaagcaccaacaatgatgaagacagcacgagcaagaggtatgggggcttcatgagaggcctcaaaagaagcccccagctggaagacgaagcaaaggagctgcagaagcgctatgggggcttcatgagaagggtcgggcgccccgagtggtggatggactatcagaagagatacggaggcttcctgaagcgctttgctgagtctctaccctcggatgaagaaggcgaaagttactctaaagaagttcccgagatggaaaaaagatacggaggctttatgcggttttgaagcccttcccagcagtgatcccgggcccccactagcctgctccatcccccgtgagcaactgccccatcagtgatgtttcttgtcatgtgctgcttgtgctgtacagttgccctcgtggtctggataactgctgcctgaaagctgtgatttttagggggttgtctgtattcttttgagtcttgaagctcagtattggtctcttgtggctatgttatcatgctgaaacagtctgttacctcatcccttctgacaaaacgtcaataaatgcttatttgtatataaaaataataaacccgtgaacccaactgc

SEQ ID NO: 133 - protein, 807 aa, Rattus norvegicus
  F-spondin
MRLSPAPLRLSRGPALLALALPLAAALAFSDETLDKVAKSEGYCSRILRAQGTRREGYTEFSLRVEGDPDFYKPGSSYRVTLSAAPPSYFRGFTLIALKENREGDKEEDHAGTFQIIDEEETQFMSNCPVAVTESTPRRRTRIQVFWIAPPTGTGCVILKASIVQKRIIYFQDEGSLTKKLCEQDPTLDGVTDRPILDCCACGTAKYRLTFYGNWSEKTHPKDYPRRANHWSAIIGGSHSKNYVLWEYGGYASEGVKQVAELGSPVKMEEEIRQQSDEVLTVIKAKAQWPSWQPVNVRAAPSAEFSVDRTRHLMSFLTMMGPSPDWNVGLSAEDLCTKECGWVQKVVQDLIPWDAGTDSGVTYESPNKPTIPQEKIRPLTSLDHPQSPFYDPEGGSITQVARVVIERIARKGEQCNIVPDNVDDIVADLAPEEKDEDDTPETCIYSNWSPWSACSSSTCEKGKRMRQRMLKAQLDLSVPCPDTQDFQPCMGPGCSDEDGSTCTMSEWITWSPCSVSCGMGMRSRERYVKQFPEDGSVCMLPTEETEKCTVNEECSPSSCLVTEWGEWDDCSATCGMGMKKRHRMVKMSPADGSMCKAETSQAEKCMMPECHTIPCLLSPWSEWSDCSVTCGKGMRTRQRMLKSLAELGDCNEDLEQAEKCMLPECPIDCELSEWSQWSECNKSCGKGHMIRTRTIQMEPQFGGAPCPETVQRKKCRARKCLRSPSIQKLRWREARESRRSEQLREESDGEQFPGCRMRPWTAWSECTKLCGGGIQERYMTVKKRFKSSQFTSCKDKKEIRACNVHPC

SEQ ID NO: 134 - DNA, 4029 bp, Rattus norvegicus
  F-spondin
ccctccctcttcgcgctccttcgccaccgcccgcccctcagctccgctgctcggctccgctcagagcagcgcagctccgcagccaaagcgaggcgggctcgggctccccaccgccagtgccacccgggctcctccagctttcgcctctgcagctcccgtcacttggagtaaaagtgtcctgacaggggtctgcaacatcagcagaaagttgggaggtcctcgagaatgaggctatctcccgcgcccctgaggcttagccggggtccggcgctgctggccctggcgctgcccctggccgcagcgctcgctttctcggatgagaccctggacaaagtggccaagtcggagggctactgcagccgcatcttgcgcgcccagggcacacggcgtgagggatacacagagttcagcctccgcgtggaaggcgaccctgacttctataagccaggaagcagctaccgagtgacactctcggctgcccctccctcctacttcagaggcttcacgttaattgctctcaaagagaaccgcgaaggcgataaggaagaagaccacgcgggcaccttccagatcatagatgaagaagaaacccagtttatgagtaactgtcctgtggcagtcactgaaagcacccctcggaggaggacacggatccaggtgttttggatagcgccacccacagggacaggctgtgtgattctgaaggccagcattgtacagaaacgcattatctattttcaagacgagggctccctgaccaagaagctgtgtgaacaggatcccacacttgatggagtgacggacagaccgatcttagactgctgcgcctgcggaactgccaagtacagactcacgttttatgggaactggtcggagaagactcatccaaaggattaccctcgtcgggctaatcactggtctgccatcattggcggatcccactccaagaactacgtgctgtgggagtacggagggtatgccagtgaaggggtcaagcaagttgctgaacttggctcaccagtaaaaatggaggaagaaattcgacaacagagtgatgaagtcctcactgtcatcaaagccaaagcccagtggccatcctggcagcctgtcaatgtgagagcagcaccctcagccgaattctcagtggacaggacacgccacttgatgtccttcctaaccatgatgggccccagtcctgactggaacgtgggcctatctgcagaggatctgtgcaccaaggagtgtggctgggtccagaaagtggtgcaggacctaattccctgggatgctggcacggacagcggggtgacctacgagtcaccaaacaagcccacaattcctcaggaaaaaatccgacccctgactagtctggaccatcctcagagtcctttctatgacccggaaggtgggtccatcacacaagtggccagagtcgtcatcgagagaattgcccggaagggagaacaatgcaacattgtacctgacaatgtggatgatattgtagccgacctggctccagaagagaaagatgaagatgacacccctgaaacctgcatctactccaactggtccccatggtcggcctgcagctcttccacttgtgaaaagggtaagaggatgcggcaacgcatgctgaaggcacagctggacctcagtgtcccctgtcctgacacccaggacttccagccctgcatgggccccggctgcagcgatgaagatggctccacctgtaccatgtcggagtggatcacctggtcaccctgcagtgtctcgtgtggcatgggtatgaggtcccgggagaggtacgtgaagcagttcccggaagacggctcggtgtgcatgctgcccacggaagagacagagaagtgcacggtcaacgaggagtgctctcctagcagctgcctggtgactgagtggggtgagtgggatgactgcagcgccacctgtggaatgggcatgaagaagcggcaccgcatggtcaagatgagccccgcggacggctccatgtgcaaggcggagacttcgcaggcggagaaatgcatgatgcctgagtgccataccatcccgtgcttgctgtctccttggtccgagtggagcgactgtagcgtgacctgtgggaagggcatgcggacgcgccagcggatgctcaagtctctggcagagctgggggactgtaatgaggatctggagcaggcggagaagtgtatgctgccagagtgccccattgactgcgaactcagtgagtggtcccagtggtctgaatgtaacaagtcctgtgggaaaggtcacatgattcgaacccggacaatccaaatggaacctcagtttggaggtgcaccctgcccagagactgtgcaacgcaagaagtgccgtgcccggaaatgccttcgcagcccatcgatccagaagctgcgctggagggaggcccgagagagcaggaggagtgagcagctgagggaagagtcagatggagagcagttcccaggctgtcggatgcgcccgtggacagcctggtcagagtgcaccaaactgtgcggaggtgggatccaagaacgctacatgactgtgaagaagaggttcaaaagctcccagtttaccagctgcaaagacaagaaggagatcagagcgtgcaacgtgcacccttgttagtaggggttcaactccccagggctgcattccagattctagtcaccaatggttgggtggtgtatttgcttgtttaagatgatttaaattgtgtccacatgttttcatttttaccggtgtggtttgcccaatagtcttatggaggccgagggacatcttgtctgaatacttcttggtgagtacaggccaagcggggcatcttgtccccaggcgccatcttcctgcactgagttgagtagtgttggttcaccttggtactaaactgaatcgtgtccctctggagcatcccctggtcaagcagggtggagactttggccatccacaaggagaagcaaccaggatgcagcatgcgggagacacagccattaattgcaaaggacagatcctcctctctcacctttggcctgctcactcttacagaaacctgtttgtccgcctccttttttatttagcacaactccaggcatcttggtaagtctccagggtcatgggttcttcggtgccctgaaggagaagccctgaggtgaggtggcatttgttacaaacctcccaatactgctttactggcatcacaaggtcagcaggtgatgatggctacttcatttcattgtgagccgtgatttccgttgagttttgattgttggtgccataaatgtcctaggatgctggacggacacatcagccttgtcagcagatccttctttgagccaatgtagacagtaagctgggcactggttccaaagccaacttaaaatcttcctacacatatccagacctttttttaggttgcccaaacttccttagaataaagcattttagctctgagaactacttgataagtctgccaggaagcccccaagtcaattcttcaacaaaaatactatcttccctacttaattttttttaagtcatgatattttatagttagaggagagagagacaatctattcccatgactaagacacaaacctacaagaaagggttactcagtcaagcctgtgcctgacttctggaccaggcccctgattttcatggatagtccaaaggaaggccaggggttcccactgactccaagccatcagcagcacccaaacccaggagcaacaaatattcagagaaagaggatgtttatctcagctatgagctcattggcaggttgtactcatgcatctgttaaaagcaccaccacatccttttgcaagtctgtttattaccgcttcatccaaatacattttgtggtcaagatcgacacagtgctatgaatacagtactttaaggtctgcattaaacacatcagaatatttcctgccacatctatgtacaacccctgaatatgtatttttccttaacacaagagagcctgttcaattaaaaaaaaaaaaa

SEQ ID NO: 135 - protein, 11 aa, Rattus norvegicus
  NF 68
MSSFSYEPYFS

SEQ ID NO: 136 - DNA, 2322 bp, Rattus norvegicus
  NF 68
ccccctgcaccactcccttgtgggtagtctgctctgcagtcaaaagtattatcgaggagccctccctgccccaaaggaatcacacacacacacacacacacacacacacacacacacacacacacacacacacgagagagagagagagaggagagagagagagagagagagagaggcttaagatctctgagaatgacctgtaacttccgaggaaacgtgctggcagaatggaagcgaacaatgtccaatagaggtgtgtgcagaccctctacaaaagattgtgaaataattcaggttacatggagcgagcttgggggaaacaattgcaactcttcgtctatatgagtaattggaaggaagaaaagctatgacgtatctgagaccttctctctgttcctcccccttgagtcctcttgatcactgatgaatgagaaaaagatgcaggttacagagagacatcttaataaatgcttggctctgtatgccagccacacactcaggcaacctgggtgattaggtttgaaagcttagattgtataaacatgggtgggcctctaatatggcttagacttaacagctttaagccatcagcaacctcacagaagtcctctgcttcagcccattcctctcccgtgaagggacaagttaatcagaatcacagtgtgtgtaacacgagaaaggagtatgcagaataaagcttccttcacactctttttggatacagctccaaaaatttgcattactttttaatttgaaagccgttacctctcactgtgccatttaaaggaaccagtcagccagtgttatgttgaacaaattaaacaaaacgccaactgcttggttaaaggttttatttatttatttatttatttatttatttatttatttatttatacaaatctctgcaatatctcttcgaaaccgcaggcaaccacaacggcagtatgaaaacgttccacccatgtgcgttttcgtacccactctgctacctgggtatcctgaaggaagttggtagcttcctaagggcacccgttacctgtgaatttcagcaggctgtttcagcaggctccacgctgagttctcttccggaagaccacacccagagctggtagcactttgcagcattctctctctctctctctctctctctctctctctctctctctctctccctccctcactccctcactcccttcctccctctctccttccctccctctctctccatccaacctacatggcttgtcaaaaccatcagattaggctaccacacaggtgttaaaaaggggaagaggctttcgatgcggtggaggtagcatacaggcaccctgaagttctcccgcagcagagcgcatcttttgccttgcaaatctttgcctggttagtttcaacccgtcctaagcattccagacttcatttcccataaagaaaggggaaattctatggaaggcgccagacaaattagctgctgtaaaggttttaaaatgtcaaaatgaacacccgctatcctgcggttccaagggtgtgtgtagcggtacccgtcccctatgtattgagaagcagattatacggaaagaaataaaaaagaaaaaataaaagaaggcaggagaaaggggggtgaattcaagaaaatgtcagaaaatagctacaaaggcatgcaaaacttttcctgcaggaatgtcgcaagggcgaaaccttaaactattgtcagtaacctaaccaccctggccttacaaccaggctccttaaataagaatcacggtgcttgagagggtccctgaggcagaaagggcgagccaggggcggactggggtggggtgagggtgtctttgtgacattagatgttaaaagttgatgtgtcagtagggacctattatttggaaattttaagggtcctagtgaggcgggttttaggtattgacaggcaggatgggtcgggggagtaggaaaggaatgagcagggaagttatgggggtttcagagaaagtagggggcctcagagaaaagcggccaggcgggagccgcagtccgctagcctcctgtcgctcgcccccgcctttgctcttgcgcagaatcctccccttggctgcagcagcacgctgcccccactggcctgcgcaacgcgatcgatcacagtctgcgtcagagtcccggcgtataaatagaggtggcaggacagcccagagccgcacacagccatccatccttccctttccctcttctccccggttcttctctctaggtcccctatctccgccccgggcctgaggggcgcaccgaccgccaccatgagttcgttcagctacgagccgtacttttcga

SEQ ID NO: 137 - DNA, 824 bp, Mus musculus
  E800
gaattccgggagcccttgattgacaaggaatattaccgcaagccggtggcgggaactcaccgaagaggagaagtatgaccaggagctcaagaaaacccagtttatcaaagctgcggccgcgactgaaaccagctcggtgttcgcagacccggtcatcagcaaattcaccaacatgacgatgaagggaggcaacaaagttctggcccggtctctcatggctcagactctggaagctgtgaaaaggaagcagtttgaaaagtaccgtgctgcctctgcggagggaacaggccaccatttgaacggaacccctaccaggatcttccacgagggcactcaaaaactgtgtagcctgtggattgggttggtgccgatcctcaaagggggccatttctaccaggtccccgtgcctctcggtgtaccgacggtcggcgcttcttgggcatgaagtgggatgatcacagagtgccgagagaataaacggcggcggacaattatgccagagggaacttttcaaatgagctgctggaggcttttcataaccgaggtcccgtgatcaagaggaagcacaatatgcataagatggcagaggccaaccgtgccctggcccactaccgctggtggtagcaggagaggagaggtgggaaaggacacactccctcgagaaaccacccgacggctggagaggtggctcagtggttaaagccactcactgctctttccacaggacctggtttgattcccagcactcacacggaggctcgctgaccacctgtaactcctgttccaaaggtttcgataccttctgacctctgggcggaattcgc

SEQ ID NO: 138 - protein, 286 aa, Homo sapiens
  Human capping protein alpha subunit isoform 1
MADFDDRVSDEEKVRIAAKFITHAPPGEFNEVFNDVRLLLNNDNLLREGAAHAFAQYNMDQFTPVKIEGYEDQVLITEHGDLGNSRFLDPRNKISFKFDHLRKEASDPQPEEADGGLKSWRESCDSALRAYVKDHYSNGFCTVYAKTIDGQQTIIACIESHQFQPKNFWNGRWRSEWKFTITPPTAQVVGVLKIQVHYYEDGNVQLVSHKDVQDSLTVSNEAQTAKEFIKIIENAENEYQTAISENYQTMSDTTFKALRRQLPVTRTKIDWNKILSYKIGKEMQNA

SEQ ID NO: 139 - DNA, 2385 bp, Homo sapiens
  Human capping protein alpha subunit isoform 1
atggccgacttcgatgatcgtgtgtcggatgaggagaaggtacgcatagctgctaaattcatcactcatgcacccccaggggaatttaatgaagtattcaatgacgttcggctactacttaataatgacaatctcctcagggaaggggcagcacatgcatttgcccagtataacatggatcagttcacgcctgtgaagatagaaggatatgaagatcaggtcttaattacagagcacggtgacctgggtaatagcagatttttagatccaagaaacaaaatttcctttaaatttgaccacttacggaaagaagcaagtgacccccagccagaagaagcagatggaggtctgaagtcttggagagaatcctgtgacagtgctttaagagcctatgtgaaagaccattattccaacggcttctgtactgtttatgctaaaactatcgatgggcaacagactattattgcatgtattgaaagccaccagtttcagcctaaaaacttctggaatggtcgttggagatcagagtggaagttcaccatcacaccacctacagcccaggtggttggcgtgcttaagattcaggttcactattatgaagatggcaatgttcagttggttagtcataaagatgtacaggattcactaactgtttcgaatgaagcccaaactgccaaggagtttattaaaatcatagagaatgcagaaaatgagtatcagacagcaattagtgaaaactatcaaacaatgtcagataccacattcaaggccttgcgccgccagcttccagttacccgcaccaaaatcgactggaacaagatactcagctacaagattggcaaagaaatgcagaatgcttaaaggctgaatgtaggattcttcagtatgtggaaagacaaggattcaacgtgtggtcatatgataaataagtgatttataaacaagagtgatattttgctagggctttcaaagttaaccggttttctagcctcatggaatactgttgaacctatagcgttgtcttgattcttttgtgttctctgccttgtaattttctgttactgctatatctacgtgtaaatctttttttctttttttttttttttttttttcttttttggttaattctgccacatttaatgttggtgagagagtgatctatcctaatgacatttactgtttaaaaaagtttcctagccatgaagccctgctactgatttagacaaggtattatggtcattactttgtacccctatccttccaagcacttctggtacttcagtcgtttttactgatccaccaacacctaaagaggctatgctacagtctctagctaaatggaagacacattcatccttctccctctgactgctttgatcatcatttattgcatcgtcatatcatatttatcgcatctcataactaactttctaaagtttggattgggacttttcaggtcctttttggagggcaaaggaagttccagcttctctggggaacttgtttttaaatccaaagacttgaaccacattccctgcacatgaacatgtttgcttttatcccttctctcattggctccttcccatcttagtaccattgtagttatacatctgcattttttagaagcattttacccatttatttttttaaacattcaagaactgctgacgtactgtggatgtagagtataaaacttgaaaaatgcagatgttgaaggaataataggtatcttgtgctttaatactttatggcaggattgtactataagcaaatgaattaaacagctatgtaaatcataaagaaaaactaaaaatgaaccaaagtgaaaggataacttccaggcagtatctttctattgtaacctgttatttaaggaaatactagtgatttcttctaaataggatgtaaacttctttcaaattactcttcctcagtctgcctgccaagaactcaagtgtaactgtgataaaataacctttcccaggtatattcggcaggtatgtgtgtaatctcagaatacacaggtgacatagatatgatatgacaactggtaatggtggattcatttacattgtttacacttctatgaccaggccttaagggaaggtcagttttttaaaaaaccaagtagtgtcttcctacctatctccagatacatgtcaaaaagaaaaggtgtttgtgctccgttttgtttctgctcagtaatatagtcaagcaagtttgttccaggtgacccattgagctgtgtatgcatttttgtttatttcaataaaatatatttgtattatttgtccttcatactatccatccataccacactatcttctgtatcaggtagtctaatagaaatatacctgttttgttctaaaaaaaaaaaaaaaaaaa

SEQ ID NO: 140 - protein, 1095 aa, Homo sapiens
  KIAA0456 Protein
RTRGLDFFRGSINSQFEFGRKKENMTSPAKFKKDKEIIAEYDTQVKEIRAQLTEQMKCLDQQCELRVQLLQDLQDFFRKKAEIEMDYSRNLEKLAERFLAKTRSTKDQQFKKDQNVLSPVNCWNLLLNQVKRESRDHTTLSDIYLNNIIPRFVQVSEDSGRLFKKSKEVGQQLQDDLMKVLNELYSVMKTYHMYNADSISAQSKLKEAEKQEEKQIGKSVKQEDRQTPRSPDSTANVRIEEKHVRRSSVKKIEKMKEKRQAKYTENKLKAIKARNEYLLALEATNASVFKYYIHDLSDLIDQCCDLGYHASLNRALRTFLSAELNLEQSKHEGLDAIENAVENLDATSDKQRLMEMYNNVFCPPMKFEFQPHMGDMASQLCAQQPVQSELVQRCQQLQSRLSTLKIENEEVKKTMEATLQTIQDIVTVEDFDVSDCFQYSNSMESVKSTVSETFMSKPSIAKRRANQQETEQFYFTKMKEYLEGRNLITKLQAKHDLLQKTLGESQRTDCSLARRSSTVRKQDSSQAIPLVVESCIRFISRHGLQHEGIFRVSGSQVEVNDIKNAFERGEDPLAGDQNDHDMDSIAGVLKLYFRGLEHPLFPKDIFHDLMACVTMDNLQERALHIRKVLLVLPKTTLIIMRYLFAFLNHLSQFSEENMMDPYNLAICFGPSLMSVPEGHDQVSCQAHVNELIKTIIIQHENIFPSPRELEGPVYSRGGSMEDYCDSPHGETTPVEDSTQDVTAEHHTSDDECEPIEAIAKFDYVGRTARELSFKKGASLLLYQRASDDWWEGRHNGIDGLIPHQYIVVQDTEDGVVERSSPKSEIEVISEPPEEKVTARAGASCPSGGHVADIYLANINKQRKRPESGSIRKTFRSDSHGLSSSLTDSSSPGVGASCRPSSQPIMSQSLPKEGPDKCSISGHGSLNSISRHSSLKNRLDSPQIRKTATAGRSKSFNNHRPMDPEVIAQDIEATMNSALNELRELERQSSVKHTPDVVLDTLEPLKTSPVVAPTSEPSSPLHTQLLKDPEPAFQRSASTAGDIACAFRPVKSVKMAAPVKPPATRPKPTVFPKTNATSPGVNSSTSPQSTDKSCTV

SEQ ID NO: 141 - DNA, 6305 bp, Homo sapiens
  KIAA0456 Protein
cggacgcgtgggttggattttttccgtggatctatcaattcacaattcgaatttggaagaaagaaggaaaacatgacgtctccagccaaattcaaaaaggataaggagatcatagcagagtacgatactcaggtcaaagagatccgtgctcagctcacagagcagatgaaatgcctggaccagcagtgtgagcttcgggtgcaactgttgcaggacctccaggacttcttccgaaagaaggcagagattgagatggactactcccgcaacctggagaagctggcagaacgcttcctggccaagacacgcagcaccaaggaccagcaattcaagaaggatcagaatgttctctctccagtcaactgctggaatctcctcttaaaccaggtgaagcgggaaagcagggaccataccaccctgagtgacatctacctgaataatatcattcctcgatttgtacaagtcagcgaggactcaggaagactctttaaaaagagtaaagaagtcggccagcagctccaagatgatttgatgaaggtcctgaacgagctctactcggtgatgaagacatatcacatgtacaatgccgacagcatcagtgctcagagcaaactaaaggaggcggagaagcaggaggagaagcaaattggtaaatcggtaaagcaggaggaccggcagaccccacgctcccctgactccacggccaacgttcgcattgaggagaaacatgtccggaggagctcagtgaagaagattgagaagatgaaggagaagcgtcaagccaagtacacggagaataagctgaaggccatcaaagcccggaatgagtacttgctggctttggaggcaaccaatgcatctgtcttcaagtactacatccatgacctatctgaccttattgatcagtgttgtgacttaggctaccatgcaagtctgaaccgggctctacgcaccttcctctctgctgagttaaacctggaacagtcgaagcatgagggtctggatgccatcgagaatgcagtagaaaacctggatgccaccagtgacaagcagcgcctcatggagatgtacaacaacgtcttctgcccccctatgaagtttgagtttcagccccacatgggggatatggcttcccagctctgtgcccagcagcctgtccagagtgagctggtacagagatgccaacaactgcagtctcgcttatccactctaaagattgaaaacgaagaggtaaagaagacaatggaggccaccctgcaaaccatccaggacattgtgactgtcgaggactttgatgtgtctgactgcttccagtacagcaactccatggagtccgtcaagtccacggtctctgaaaccttcatgagcaagcccagcattgctaagaggagagccaaccagcaagagacagagcagttttatttcacaaaaatgaaagagtacctggagggcaggaacctcatcaccaagttacaagccaagcatgaccttctgcagaaaaccctgggagaaagtcagcggacagattgcagtctagccaggcgcagctcaactgtgaggaaacaggactccagccaggcaattcctctggtggtggaaagctgtatccggtttatcagcagacacggactacagcatgaaggaattttccgggtgtcaggatcccaggtggaagtgaatgacatcaaaaatgcctttgagagaggagaggaccccctggctggggaccagaacgaccatgacatggattccatagctggtgtcctgaagctttacttccgggggctggaacaccctctcttccccaaggacatctttcatgacctgatggcctgcgtcacaatggacaacctgcaggagagagctctgcacatccggaaagtcctcctagtcctgcccaaaaccactctgattatcatgagatacctctttgccttcctcaatcatttatcacagttcagtgaagagaacatgatggacccctacaacctcgccatctgcttcgggccctcgctaatgtcagtgccagagggccacgaccaggtgtcctgccaagcccacgtgaatgagctgatcaaaaccatcatcatccagcatgagaacatcttcccaagccccagggagctggagggccctgtctacagcagaggaggaagcatggaggattactgtgatagccctcatggagagactaccccggttgaagactcaacccaggatgtgaccgcagagcaccacacgagcgatgacgaatgtgagcccatcgaggccattgccaagtttgactacgtgggccggacagcccgagagctgtcctttaagaagggagcatccctgctgctttaccagcgggcttccgacgactggtgggaaggccggcacaatggcatcgacggactcatcccccatcagtacatcgtggtccaagacaccgaggacggtgtcgtggagaggtccagccccaagtctgagattgaggtcatttctgagccacctgaagaaaaggtgacagccagagcgggggccagctgtcccagtgggggtcatgtagccgatatttatcttgcaaacatcaacaagcaaaggaagcgtccagaatctgggagcatccggaaaacttttcggagtgacagccatgggctgagcagttccctgactgactcctcctccccaggggtgggggctagctgccgcccatcctcccagcccatcatgagccagagcctccccaaagaagggccagataagtgttccatcagtgggcacgggagcctcaactccatcagccgccactcatccctgaagaatcggctggatagtccacagatccggaagactgccacagcgggaaggtcaaaaagcttcaataaccatcggcccatggaccctgaggtcattgctcaggatattgaggcaacaatgaactcggccctgaatgagctacgggaactagaacggcagagcagtgtcaaacacacccctgacgtggttctggacaccttggagcccctcaaaacctccccagtggtggcccccacgtcagagccctccagccctctgcacacccagctcctcaaggaccccgagcccgccttccagcgcagcgccagtactgctggggacatcgcctgcgccttccggcctgtcaagtctgtcaagatggctgccccggtcaaaccaccagccacacggcccaagcccactgtcttccccaaaacaaatgccactagccctggtgtcaactcatcaacttccccacagtctactgacaagtcttgtactgtctgagggataataatttaattgttctagacaaggggactatagggactgactgttattaaaatcttcctatttaactagcttggggacttcagttgaaaattaggttctaagttgttcttgcaggaattagcctccccgtctcccaaaaccttgagaatgaagcccttggtatcgcctctcccttcccactgccctctgcttcccccagtcgtcgtaattcagccagctgcagtccgtaccgttcttaggttagccagagacaggttttcattatcaggtcactgtgaaatctggtaaggcagtcctgaggacatgggctcaagtctcagtcccctcagaccacggtgatgccttgaccagatggttggctactgccatccagctttcagtggcatcttgttttgggaactgattatagagaatcatatatagtccagtcttcattttacatacacacacatattttacacacacacacattttacacacacacacacacacacacacacacacatatgtttttctagtctctggcatgtgtagcctctcctggtcatagaccagtctctttgtaagttattgtggcagttcacacagtagccaccaggggtctctgtttccattacaaactttgttctgtctgggccagagaacctagcctttgaaatctctccatcatgtgaaacataacgggatgggacaatcccgtaacctgtttggggttgggggctttctctctgtgttctttccattgatgtgaattggtcattggtgtttgctcttgcctctcctccatcccctagaagtacacccccgtcttattaaggagcttttaaagtttttctgaatgtatagacatttctcgggttcctacctttgtctctgatggaccattttccatttaagacattttcctgtataagacagttttatagctggttccttttagggtaaagagtcttaagagagttttattgtgtctatggcaggtttgggaaaggtaagaaatgggtcctttttcctcctaatgtttttggcacttaaaacataaaattcattatcctattaaaaaattaaattcagctttgctaatccagaaattgttcccaaatgaaaacttgttttaagtccaccccttagtttccttattttacaaggtctctcttcagggaccaacaggggcttagagagccttagttagattaaagggagaccctacctcttaaaaccagttttcatttatgcaaacaaggacaattaagggaaccctgaccccacaggctctcaagtcttcccaaggccagaatcgaaagaaaattaaaatttgaatgctgaatattctggctctactctggccttttttctggttcccttccaaaatgcacaaatcatacccttgtctgctccaattcagtctccaaacctggtgcctgtgctcctggcccccctagcatcatgctatcccaggagtatcaggaccagacacatccacagccaggctcatgggtctcagacagcaacttgagttaaagctgaaactcatccttcttctctgtgttttctggtttaaaagctgcacttatattttagccttattattttctgtagttccggagagatggtgggttgccattctggtaggaaaatctgagttttcttatctttgacctagaagagattctttttggaccaacctgcgaaattggtagttaggtctatggaaagtggtaggatttttttttttttaatcctgtgcaaaggaaaagaggtgctttgtgggaaatcactaatgagaaggctaacctgcagcaccagagaaacctttccaagtgctaggcaggagaactgaagaactctttcagtgaagtgagtcagcctagaagaggcaacccacagtcttgatttttgttgctgtttcctgacctgttcttgcctgtcacctgggcctacacaggtcccgagccaacggggctttcatacccaaggatctgtttccttgctgaaaatgaaaccctatctttcactttacattcctttcaatccaactgatcaaaactggtacccacacttgccctttctccctctctccagcacactcccctctaagaaagtaaaagcaaagctttcttaatggcaacactttgggcctgttctgttgctcctgccttatttctctttcaaccctgtacatgactcgtgttcaccatccccttgatcagtgtccatccgcgctaatttgcatcatgaactgaacagtgtgtgagtggtcacctactaaacccagctctgggggcagagctgtcttccccatctctggtgctcctaacacctgtgagatggtcctgtcgagaggactaggaaccgataggaggagagtccttctcggcagagctcactgcaaacaactggaattgaggttgcacactgtgatttttacaccgaaaagccaaaaggagctggccatccagggcctagggagaccagccttcctcagctatgcttgccgaaaccagcatgatgcttcaaagagccctgctccacccctcatggcatggatccttttcctggtgtggactctgaagggtcagtcttcggggaagagaggtggggtggggctactagcatcccaatttagaaaatagaggagtttgtagccagcagcctgtaaactggaaacactggtctcagccaacctcctcagggcgccctggcttctccccaaggagatgaggagcggtgatgccagcaccgggatgcgcagagcactggaagggctggtgcagatctacttcccatgcagaagagaagtcacatcttccagggaatcgcaatgttgtggcgtctgacttgtatgtcacatttgtgtaaaatggtatattctttaaaatagtgttgataactggaatattgtatgtatgcttggagatgctttgtgtgaacctaagactgtcactcaacagatgttggattggggaaaatccaaagcacaacttcaaaataaaatacatttttaggtttcg

SEQ ID NO: 142 - protein, 330 aa, Homo sapiens
  Human potassium channel modulatory factor
MSRHEGVSCDACLKGNFRGRRYKCLICYDYDLCASCYESGATTTRHTTDHPMQCILTRVDFDLYYGGEAFSVEQPQSFTCPYCGKMGYTETSLQEHVTSEHAETSTEVICPICAALPGGDPNHVTDDFAAHLTLEHRAPRDLDESSGVRHVRRMFHPGRGLGGPRARRSNMHFTSSSTGGLSSSQSSYSPSNREAMDPIAELLSQLSGVRRSAGGQLNSSGPSASQLQQLQMQLQLERQHARAARQQLETARNATRRTNTSSVTTTITQSTATTNIANTESSQQTLQNSQFLLTRLNDPKMSETERQSMESERADRSLFVQELLLSTLVR

SEQ ID NO: 143 - DNA, 1595 bp, Homo sapiens
  Human potassium channel modulatory factor
ggacactgcagccggagcccgggaggggccgcgccgccaccgtctgaactaggatgtcccgacatgaaggtgtcagctgtgatgcatgtttaaaaggaaattttcgaggtcgcagatataagtgtttaatttgctacgattacgatctttgtgcatcttgttatgaaagtggtgcaacaacaacaaggcatacaactgaccacccaatgcagtgcatattaacaagggtagattttgatttatactatggtggggaagctttctctgtagagcagccacagtcttttacttgtccctattgtggaaaaatgggctatacggagacatctcttcaagaacatgttacttctgaacatgcagaaacatcaacagaagtgatttgtccaatatgtgcagcgttacctggaggcgatcctaatcatgtcacggatgactttgcagctcatcttacacttgaacacagagcccctagagatttagatgaatcgagtggtgttcgacatgtacgtagaatgtttcaccctggccggggattaggaggtcctcgtgctcgtagatcaaacatgcactttactagcagttctactggtggactttcttcttctcagagttcatattctccaagcaatagggaagccatggatcctatagctgagcttttatctcagttatcaggagtgagacgttctgcaggaggacagcttaattcctctggcccttccgcttctcagttacaacaactgcagatgcagctgcagctagaacggcagcatgccagggcagcacggcaacaactggagaccgcacgcaacgcaacccggcgtactaacacaagcagtgtcaccactacaatcacacaatccacagcaacaaccaacatagctaatacagaaagcagtcagcagactctacagaattcccagtttcttttaacaaggttgaatgatcctaaaatgtctgaaacggagcgccagtccatggaaagcgagcgtgcagaccgcagcctgtttgtccaagagctccttctgtccactttagtgcgtgaagagagctcatcctcagatgaggatgatcggggggagatggcagattttggtgctatgggctgtgtagatattatgcctttagatgttgctttagaaaacctaaatttaaaagagagtaataaaggaaatgagcctccaccacctcctctttgatgacatcccaattcgcagacaatgtcctctgtgctgtatttgccaatgaaagtggacaacaactatcttgggtttgtttggtgattgtaatttcaggtctgtcactcttgttacattgtgtacattcaaaaggaagagagaaaatatatatgataatcatttccacttaactaatttttacttctagcaggtaaatgtaggtagcagtgcaggggtgatctctgcttcctgtaccttgacatgcaaaaggctctcctaatactccacattcaaactgaagaggaaaattgaaatctctaatgaagctgctgtgtgtatttatgaatattaatgaataaaaactgcttggatggtttaccttaaaaaaaaaaaaaaaaaaaaacaacaaaaaaaaaa

SEQ ID NO: 144 - protein, 589 aa, Mus musculus
  RNA1 homolog
MASEDIAKLAETLAKTQVAGGQLSFKGKGLKLNTAEDAKDVIKEIEEFDGLEALRLEGNTVGVEAARVIAKALEKKSELKRCHWSDMFTGRLRSEIPPALISLGEGLITAGAQLVELDLSDNAFGPDGVRGFEALLKSPACFTLQELKLNNCGMGIGGGKILAAALTECHRKSSAQGKPLRLKVFVAGRNRLENDGATALAEAFGIIGTLEEVHMPQNGINHPGVTALAQAFAINPLLRVINLNDNTFTEKGGVAMAETLKTLRQVEVINFGDCLVRSKGAVAIADAVRGGLPKLKELNLSFCEIKRDAALVVAEAVADKAELEKLDLNGNALGEEGCEQLQEVMDSFNMAKVLASLSDDEGEDEDEEEEGEEDDEEEEDEEDEEDDDEEEEEQEEEEEPPQRGSGEEPATPSRKILDPNSGEPAPVLSSPTPTDLSTFLSFPSPEKLLRLGPKVSVLIVQQTDTSDPEKVVSAFLKVASVFRDDASVKTAVLDAIDALMKKAFSCSSFNSNTFLTRLLIHMGLLKSEDKIKAIPSLHGPLMVLNHVVRQDYFPKALAPLLLAFVTKPNGALETCSFARHNLLQTLYNI

SEQ ID NO: 145 - DNA, 2981 bp, Mus musculus
  RNA1 homolog
caaaaatcctcctccgccgccataatcggctggggatcgtggagcaggtggtgtgcacgagctaaacgaggagccgcggcagcaaggagaggcaagcagactggtcactgggcctggcccccacgcggactctcaagcagtgaccgacgcgcgcgttccgtccccccacgccgcggtgccgctaatttgtggccgtctgctgaccttggatagctcaataccatccctgttttgctttgtttacagacctgcaggggagcccgccactgcagccatggcctctgaagacattgccaaactggcagagaccctggctaaaactcaggtagccggagggcagctgagttttaagggcaagggtctcaaactaaatactgcagaagatgctaaagatgtgattaaggagattgaagagtttgacggcctcgaagctctacgattggagggcaacacggtgggcgtggaagcggccagagtcatcgccaaggccttagagaagaagtctgagctgaagcgatgccactggagtgacatgttcacaggaaggcttcggtctgagatcccaccagctctgatctcactaggggagggactcatcactgcaggagcacagctggtggaactggacctcagtgacaacgcatttggacccgatggagtgcgaggcttcgaggccctcctcaagagcccagcctgcttcaccctacaggaactcaagcttaacaactgtggcatgggcatcgggggtggcaagattctggcagcagctctgactgagtgtcaccgcaagtccagtgcccaaggcaagcccctgcgcctgaaggtgtttgtggctggcagaaatcgcctggagaatgacggagccactgcactggcagaagcttttgggatcatcgggactctggaagaggtgcatatgccacagaacggaattaaccatcctggtgtcacagccctggcccaggcctttgccatcaaccccctgttgcgagtcatcaacctaaatgacaacaccttcactgagaagggtggggtggccatggctgagactctgaagactctgcgacaagtggaagtgatcaattttggagactgcctggtgcgctctaagggtgccgttgccatcgcagatgctgtccgtggtggcctgcccaagctaaaggagctgaatctgtcgttctgcgaaatcaagagagatgctgccctggttgttgctgaggctgtggccgacaaggctgagctggagaagctggacctcaatggcaatgccctcggagaagagggctgtgagcagcttcaggaggtgatggacagcttcaatatggccaaggtgctggcatccctcagtgatgatgagggagaggatgaagatgaggaggaagaaggagaagaggatgatgaggaggaggaagatgaagaggatgaggaagatgatgatgaggaggaggaggagcaggaggaagaggaagagcctccgcagagagggtcaggggaggagccggctacaccctcgaggaagatcctggaccctaacagtggggagccagctcccgtgctgtcctccccgactcccacagacctctccaccttcctgtcattcccctccccagagaagctgctgcgtctgggtcccaaggtctcggtgctgatagtccagcagactgatacctccgacccagagaaggttgtttcagccttcctgaaggtggcatctgtgttcagggatgacgcctcagtaaagaccgcagtgctggatgccatcgatgccctcatgaagaaggccttcagctgctcctctttcaattccaacaccttccttaccaggctgctcatccacatgggtctgctcaagagtgaagacaagatcaaggccatacccagcctgcatggccccctgatggtgttgaaccacgtggtgaggcaggactatttccccaaggcccttgcacccctgctcttggcatttgtgacaaagcccaatggcgcgctggaaacctgctcctttgcccgccacaatctgctgcagacgctatacaacatctagatttaaaggcagctgcttcttgtccctcgccctgccccagtgactgagggtcttggatggactgagctcggccagcatctccattggatattttgaccagaggaagggagagggtcttgtctcctgtgtcatattggtcctttgatactgtgttggtttggtgtgtgtgtgtgggtatgtacttcctgtctggattgcagatcttcatctccctgctggactaacccaagtccactgtggggaattgatgcctaggggaagggtagaaagctgctttgttattaaacttaggccaacttagccataggcccccgttggctgtcctgtctgccctgccttcctgtcccaccaaagcctgggaattctgatccgtgctgtgtccaccgtggagtcctaaataacagaggctatcagacgatgggctatcattagaaaggtaaaaactcaggtggtacatgccttaatcccagactcaggaacagaggcaagaattctgagtttgaggccagcctggtctacaaagtgagttccaggacagccaggtctatacagaggaaccctgtctcaaaaaaacaaaaacaaaaaaaaaaaaacctctgcccttaaccatgtgacttggaggagcagccaggggagtgggagctgtctggggtaacctggctctaggaccaggtggaaaaagcaccttgctgcccagccctgttcttctcctggggaggggaagggcaggtcccctaatgcctgaaccacatgttgggcctactctctgagggttttctaagacaggagtgtgtaatagggatggagccgggtaagagatgctctgtgacttcccgaatgggctgcttggccacctcctacttcccgttgtgttgtgtgtctgctgtgcccgggagcttcacaaataaacgtcatctgtgtagttgcaaaaaaaaaa

SEQ ID NO: 146 - protein, 399 aa, Homo sapiens
  Sec62
MAERRRHKKRIQEVGEPSKEEKAVAKYLRFNCPTKSTNMMGHRVDYFIASKAVDCLLDSKWAKAKKGEEALFTTRESVVDYCNRLLKKQFFHRALKVMKMKYDKDIKKEKDKGKAESGKEEDKKSKKENIKDEKTKKEKEKKKDGEKEESKKEETPGTPKKKETKKKFKLEPHDDQVFLDGNEVYVWIYDPVHFKTFVMGLILVIAVIAATLFPLWPAEMRVGVYYLSVGAGCFVASILLLAVARCILFLIIWLITGGRHHFWFLPNLTADVGFIDSFRPLYTHEYKGPKADLKKDEKSETKKQQKSDSEEKSDSEKKEDEEGKVGPGNHGTEGSGGERHSDTDSDRREDDRSQHSSGNGNDFEMITKEELEQQTDGDCEEDEEEENDGETPKSSHEKS

SEQ ID NO: 147 - DNA, 2337 bp, Homo sapiens
  Sec62
ggagcggccaacatggcggaacgcaggagacacaagaagcggatccaggaagttggtgaaccatctaaagaagagaaggctgtggccaagtatcttcgattcaactgtccaacaaagtccaccaatatgatgggtcaccgggttgattattttattgcttcaaaagcagtggactgtcttttggattcaaagtgggcaaaggccaagaaaggagaggaagctttatttacaaccagggagtctgtggttgactactgcaacaggcttttaaagaagcagttttttcaccgagccctaaaagtaatgaaaatgaaatatgataaagacataaagaaagaaaaagataaaggaaaagctgaaagtggaaaagaagaagataaaaagagcaagaaagaaaatataaaggatgagaagacaaaaaaagaaaaagagaaaaaaaaagatggtgaaaaggaagaatccaaaaaggaggaaactccaggaactcctaaaaagaaggaaactaagaaaaaattcaaacttgagccacatgatgatcaggtttttctggatggaaatgaggtgtatgtatggatctatgacccagttcactttaaaacatttgtcatgggattaattcttgtgattgcagtaatagcggccaccctcttccccctttggccagcagaaatgagagtaggtgtttattacctcagtgtgggtgcaggctgttttgtagccagtattcttctccttgctgttgctcgatgcattctatttctcatcatttggctcataactggaggaaggcaccacttttggttcttgccaaatctgactgctgatgtgggcttcattgactccttcaggcctctgtacacacatgaatacaaaggaccaaaagcagacttaaagaaagatgagaagtctgaaaccaaaaagcaacagaagtccgacagtgaggaaaagtcagacagtgagaaaaaggaagatgaggaggggaaagtaggaccaggaaatcatggaacagaaggctcggggggagaacggcattcagacacggacagtgacaggagggaagatgatcgatcccagcacagtagtggaaatggaaatgattttgaaatgataacaaaagaggaactggaacagcaaacagatggggattgtgaagaggatgaggaagaggaaaatgatggagaaacacctaaatcttcacatgaaaaatcataatctgactaattttgggactgaatgaataagtacaagaggttggattttctatgttggctgattaccatattgaacacatggcatttgtagcattctttaaatctatctactgaaatgtatttgacattcaggcagttatattcggtccttcattttatagaatattggcactattattggtacagtttaaagccattaatatgttttatccatttgataattttacagtaagtaggtctcattcattttgacagttatcaaagatgtactttccacagttaaatttacattaatggcaatttttgatagttttatggctttttactgttagactaatcaaaaataactttaaaaggaacaaagaaactccaacatttcacattatgcatagttatgtagccatttcacagtttctttaagatgtgtaaactcattgtccttgatagtttttatttttcattataaaattataccaggagatttcttttaagattctgagttagcagagttcaaaactattttgtggaaacaagccaactagtaacaatgcagcaacacttctggtttagctaaattatttttccaatgtaggaaatccacactgatttgtacgtctgactgagagaaagatggtcgtctccagcagagaaagtgaacagcatttgttggaaggtgatggctctccctcctccctccccatttcattggcgtaacgtaaagtgtattctgtacataatttacaaataaaacattttattttaattgttacttattatttagatatttctcaacacttaaattcataaaattaagaccatgtaagggtatgtttttagagaaatggaagtttgagtaacccacagaacatctgtgatctttctacagcagcttcagttttgtgccaacattccatgtattttgaatatgagcaaaaactgatcttaagagcagacttaaagtagctttgtacgccttaatgttcattttgatttattttaaatctttacattcagaaatgagatactgtattatcagaccaggaggcattgctgtgaaagataatttcctattctaaaatatcaaatttaaaataaagataatgaaagaaaaaaaaaaaaaaaaaaa

SEQ ID NO: 148 - protein, 108 aa, Mus musculus
  Co-chaperonin cofactor A
MADPRVRQIKIKTGVVRRLVKERVMYEKEAKQQEEKIEKMKAEDGENYAIKKQAEILQESRMMIPDCQRRLEAAYTDLQQILESEKDLEEAEEYKEARVVLDSVKLEA

SEQ ID NO: 149 - DNA, 508 bp, Mus musculus
  Co-chaperonin cofactor A
agggaccatggccgatcctcgcgtgaggcagatcaagatcaagaccggagtagtgaggcgattggtcaaagaaagagtgatgtacgaaaaagaagcaaagcagcaagaagaaaagattgaaaaaatgaaggctgaagatggagagaactacgccattaagaagcaggcagagatcctgcaagagtcccggatgatgatcccagattgccagcgtcggttagaggctgcatatactgatcttcagcagatattagaaagtgaaaaagacctggaagaagccgaggagtataaagaagcccgtgtagtgctggattccgtaaagctagaagcctgacattttctgtatgggatgtttttttgcattaaatcctggggtccattctacaattcattgttttcagccactgctgtgtttaataatatgaaaacgtggttctttttatgcagttgcatttatttttctttgcataacttaatgtgtcaaataaatgagttcatctaaaaaaaa

SEQ ID NO: 150 - protein, 139 aa, Homo sapiens
  LSm4 protein
MLPLSLLKTAQNHPMLVELKNGETYNGHLVSCDNWMNINLREVICTSRDGDKFWRMPECYIRGSTIKYLRIPDEIIDMVKEEVVAKGRGRGGLQQQKQQKGRGMGGAGRGVFGGRGRGGIPGTGRGQPEKKPGRQAGKQ

SEQ ID NO: 151 - DNA, 1033 bp, Homo sapiens
  LSm4 protein
cagcggcggcggcggaagtggccggcgagcccggtccccgccggcaccatgcttcccttgtcactgctgaagacggctcagaatcaccccatgttggtggagctgaaaaatggggagacgtacaatggacacctggtgagctgcgacaactggatgaacattaacctgcgagaagtcatctgcacgtccagggacggggacaagttctggcggatgcccgagtgctacatccgcggcagcaccatcaagtacctgcgcatccccgacgagatcatcgacatggtcaaggaggaggtggtggccaagggccgcggccgcggaggcctgcagcagcagaagcagcagaaaggccgcggcatgggcggcgctggccgaggtgtgtttggtggccggggccgaggtgggatcccgggcacaggcagaggccagccagagaagaagcctggcagacaggcgggcaaacagtgagcgcccacccagaccggctgctgcgccccctcctgccagggtggcgattccgctccacagtctcggacggatctgctcagaaaggaagaggcaggcgccagggggaacccccttcgtgttttgtgaccctcccttttaggtgaagcccctttttcttgctaaaaccggcaattctccggttagaaatgttacttggtgttttttggttttgtgaaacggccgtcccaaagctggctggattcctagaagagtctgtgttgaaggcatctttcaacccctcgctctggttctcagggcagcattttccaggcgggtttgttttgcatttcttggagcctctccgagcagcaaccagacgggagatttttattttaagctgttcatgctgggactgacagcctgcagggtttccttgggcgcggccccaaaattgccttcaaaacaaacccgggacggttgaaagccttcgaaccgtgcaggggatgcctcgggccctggcccttcgcttcctctcttgtgttatggaaataaaaacaaataaaactacaaaaaaaaaaaaaaaaaa

SEQ ID NO: 152 - protein, 1358 aa, Mus musculus
  Mismatch repair protein
MSRQSTLYSFFPKSPALGDTKKAAAEASRQGAAASGASASRGGDAAWSEAEPGSRSAAVSASSPEAKDLNGGLRRASSSAQAVPPSSCDFSPGDLVWAKMEGYPWWPCLVYNHPFDGTFIRKKGKSVRVHVQFFDDSPTRGWVSKRMLKPYTGSKSKEAQKGGHFYSSKSEILRAMQRADEALSKDTAERLQLAVCDEPSEPEEEEETEVHEAYLSDKSEEDNYNESEEEAQPSVQGPRRSSRQVKKRRVISDSESDIGGSDVEFKPDTKQEGSSDDASSGVGDSDSEDLGTFGKGAPKRKRAMVAQGGLRRKSLKKETGSAKRATPILSETKSTLSAFSAPQNSESQTHVSGGGNDSSGPTVWYHETLEWLKPEKRRDEHRRRPDHPEFNPTTLYVPEEFLNSCTPGMRKWWQLKSQNFDLVIFYKVGKFYELYHMDAVIGVSELGLIFMKGNWAHSGFPEIAFGRFSDSLVQKGYKVARVEQTETPEMMEARCRKMAHVSKFDRVVRREICRIITKGTQTYSVLDGDPSENYSRYLLSLKEKEEETSGHTRVYGVCFVDTSLGKFFIGQFSDDRHCSRFRTLVAHYPPVQILFEKGNLSTETKTVLKGSLSSCLQEGLIPGSQFWDATKTLRTLLEGGYFTGNGDSSTVLPLVLKGMTSESDSVGLTPGEESELALSALGGIVFYLKKCLIDQELLSMANFEEYFPLDSDTVSTVKPGAVFTKASQRMVLDAVTLNNLEIFLNGTNGSTEGTLLERLDTCHTPFGKRLLKQWLCAPLCSPSAISDRLDAVEDLMAVPDKVTEVADLLKKLPDLERLLSKIHNVGSPLKSQNHPDSRAIMYEETTYSKKKIIDFLSALEGFKVMCKVSGLLEEVAGGFTSKTLKQVVTLQSKSPKGRFPDLTAELQRWDTAFDHEKARKTGLITPKAGFDSDYDQALADIRENEQSLLEYLDKQRSRLGCKSIVYWGIGRNRYQLEIPENFATRNLPEEYELKSTKKGCKRYWTKTIEKKLANLINAEERRDTSLKDCMRRLFCNFDKNHKDWQSAVECIAVLDVLLCLANYSQGGDGPMCRPEIVLPGEDTHPFLEFKGSRHPCITKTFFGDDFIPNDILIGCEEEAEEHGKAYCVLVTGPNMGGKSTLIRQAGLLAVMAQLGCYVPAEKCRLTPVDRVFTRLGASDRIMSGESTFFVELSETASILRHATAHSLVLVDELGRGTATFDGTAIANAVVKELAETIKCRTLFSTHYHSLVEDYSKSVCVRLGHMACMVENECEDPSQETITFLYKFIKGACPKSYGFNAARLANLPEEVIQKGHRKAREFERMNQSLQLFREVCLATEKPTINGEAIHRLLALINGL

SEQ ID NO: 153 - DNA, 8038 bp, Mus musculus
  Mismatch repair protein
gctagagattatatttagtattaccagtcctgttcagcatagtgctggggctagagcccaaggcctgtgcatgcttcacaggcaccctgtcaactgagtgaccccctagcctggttattcagttgggacaattttagaaagagttcctaaacaaactacacttgtatctgctttgaggtttttcataccttgacccagggttctgacattagaagaaagactcaagcagccttggatgactatacagcgattcaaacaagtaaaactggggattctagtgtcattgctaccttcccccgttagcttttgatctgtgcatatgaaaaatggggcattaaaaagtataactgattgtaacttcctgtttgtgttataaattggccaactcttcagccacctggttcttatttatatttctaggttcaaagtcaaaggaagcccaaaagggaggtcatttctacagttcaaagtctgagatactcagagcaatgcaacgtgcagatgaggccttaagtaaagacacggctgagaggctgcagctggcagtgtgtgatgagccttcagagccggaggaggaggaggagacagaggtcagtcactccattctcttaggggggaaggaggatatgatgtgtatgtgatgaagtgagaaataataaaaaatatagtaattgtatgtgaatgcaccatttcatttgtacatgcagacatctcccctccctggatttagcttatttagaatttcaacagtctgtctgtctgtctctgtctctctctctgttttgtacttgaagctggcctcaagctcagaatcttcttactttctgcttttcaaatggtctcccagtccagggattgaatttagggtctcaaatgtgttaggcaaatgttcttccacttggcccacccactcccttagggaaaaagctggctttgaattcaacaagtggggaaaataactagccatgcttctgcttctgcttcctaagtgctggagttagaggtgcatgtcaacatacctggggtttttttttttttgttttgttttgtttttttggagacagggtttctctgtgtagccctggctgtcctggaactcactctgtagaccaggctgccctcgaactcagaaatccgcctgcttctgcttcccgagtgctgggattaaaggcgtacacctctacacccggcaacatacctggtttatgaattgctgaggatcaaacgtaggatcaactgagcttcatctctgccccatgctggccttaatactacagtggtctttaagtgctggggttataggcctgaatcacaacatctgggttccacagatgtacttatcaaatttgattgattgatggcaccagagattgaactaaggacccgttttatatttacaagcccctttctttgtttggcaggtgcatgaggcttatttatctgataagagtgaagaggataattacaacgagagtgaagaagaagcacagcccagtgttcaggggcctaggcgaagcagccggcaagtcaagaagcgacgggtcatctcagactcggagagtgacattggtggctctgatgtagaattcaagccagacactaagcaggaaggaagcagtgatgacgcgagcagtggagttggggacagcgatagtgaggacctaggcacctttggcaaaggcgctccaaagcggaagagagccatggttgctcagggtggacttagaaggaaaagtctgaagaaggaaacaggctcagccaaacgagcaactcccattctctcagaaaccaagagtaccttgagcgctttttctgcccctcagaattctgaatcccagacccacgtcagtggaggaggtaacgacagtagtggacccactgtttggtatcacgaaactttagaatggcttaagccagaaaagagaagagatgagcacaggagacgccccgatcaccctgaatttaaccccaccacactgtatgtgcctgaagagttcctcaattcttgtaccccagggatgaggaagtggtggcagctcaagtctcagaactttgacctcgtcatcttttataaggtggggaagttttatgagttgtatcacatggatgctgttattggagtcagtgagctggggctgatattcatgaagggcaactgggcccattctggttttccagagattgcgtttggccggttctcggattccttggtgcagaagggctataaggtagcacgagtggagcagaccgagactccagaaatgatggaggcgcgatgtcggaaaatggcacacgtgtccaagtttgatagagtggtgagaagggagatttgcaggatcattaccaagggcacacagacctacagtgtgctggatggtgatccctctgagaactacagtaggtatcttcttagcctcaaagagaaggaggaagagacttctggtcacactcgtgtgtatggtgtttgctttgtggacacttcactgggcaagtttttcatcggccagttttcggatgaccgccactgttccagatttaggacgctagtggctcactatcctccagtacaaattttgttcgagaaaggaaatctctcaacagagaccaaaactgtcctaaagggttcactgtcatcttgtcttcaggaaggtctcataccaggttcccaattttgggatgccactaagaccttgcgaacactccttgaaggagggtactttactggaaatggagacagtagtacagtgctgcctctggtgcttaaaggaatgacctcggagtcagattctgttgggttgacaccaggcgaggagagtgaattggctctctctgctctaggtggtattgttttctacctcaaaaaatgcctgattgatcaggagcttctgtcaatggctaattttgaagagtatttccctttggattctgacacggtcagcacagtaaaacctggggctgtctttactaaagccagtcagcggatggtgctagacgcagtgacattaaacaacctggagattttcctgaatgggacaaatggctctactgaagggaccctgctagagagattggatacttgccatacgccctttggcaagcggctcttaaaacagtggctctgtgcccccctctgcagcccttctgccatcagtgaccgtctagatgcggtggaagatctgatggccgtgcctgacaaggtcactgaagttgcagacctcttaaagaagctgccagaccttgagaggctactgagtaagattcataatgttgggtctcccctgaagagccagaaccatccagacagcagggctataatgtacgaagaaacgacatacagcaaaaagaagatcattgattttctctctgctctagaaggattcaaagtaatgtgtaaagtctcagggcttctggaggaggtcgcgggtggttttacgtccaaaaccctcaagcaggttgttactctgcagtcaaaaagtcctaaaggccgctttcctgacctgactgcagaactgcagcgatgggacacagcctttgaccatgagaaggctcggaagaccggactcatcactccaaaagcagggtttgactctgattatgaccaagcacttgctgacatcagagagaatgaacagagcctcctggagtacttagacaaacagcgcagtcggcttggctgtaagagcatagtctactggggaatcggtaggaaccgttaccagttagagattccagagaatttcgctacccgtaatctacctgaagaatatgagctgaaatctactaaaaaaggctgtaaacgatactggaccaaaacgattgagaagaaattagctaatcttattaatgctgaagaacgcagggacacatccttaaaggactgcatgcggcgcttgttctgtaacttcgacaagaaccacaaggactggcagtctgctgtagagtgcattgcagtgttgggtaaggctttggttaacccttgtgtcccaactatccatctctaaacctagctatgtttaatatgggtgtgtgcatggatgtttaaataactacaacttaggtttcactataatagccttatgacaatttttcctagtcttggaatagtttcgaattttatcattgagggaagatttattttcaagtctctttttaaaaacacttactggtactaggtaatttcctgatttgtttaaggatctgtagcccaagctgatgttgaactcctggcaatcctcctgcctcacatccccaagtgctaggattagaggtctgggccactatttcccagcttttacaattttattttgtcatgctggcatcagatctagacctttgtgcatgcagggctatttaaacattttggccacggagccaaaatcttgagcccaaaatgcttttataaatgcttattgaaaggtttttcttttggctttattctttgtggttcttccttttgtatcgagtcagatttgcatggaaataagactggagctggatgtaggctttctgtgcgccctttggttatctttaaacatcagcacttcgcatctggagctgtctgggcatcagctttgttagcagtgtggggggttaaacgtagtgctgcaagcacaggctgtactatcacacggagggaggtctgtaacagagcttctctcatctaagcagtgagcagatgcactacagtagtggaatcctccctcagcacaggtgctctatatcggcccactcacctggctccctagctccttgtaatgtcattgtcaactgcccccccccccccccccaagcactagctgtaaagtctagcacgctgtgtcctcctctctcatctccacctcccaactttgctattctggcctaagctggtctggagctcacacagatgcctgccgtggccaaaacagaaaatgttgcttttactgagaagtacaatactttgttttgtgtgttgggagtttgggcacgcagtaagtagttcttacggaggtctctttccacgggggattgaacttgggtgggtctctgggctttgatctgctgaatcatcttgctggtaaaagacacaatagaagcaagcacaggtactatctagtgggtataagtttacccagcaagaaattaacaaaatgatgaagtcttacttgtatcctcttgacagatgtcttactgtgcctggctaactacagtcaaggaggagatggtcctatgtgtcgcccagaaattgtgttaccaggagaagacacacatcccttcttagagtttaaagggtcacgacatccctgcattacaaagactttttttggagacgattttattcctaacgacattctaataggctgcgaggaagaagcagaggaacatggcaaagcctattgtgtgcttgtgactggaccaaatatggggggcaagtctacactcataagacaggtaatttgttcttcatgttctattaagtagaaagcaattgtaagatgaagggcagatgctatagaatctagtctactatataatctaatccactgtccagagagcaaagtcccataagagaagcaaagggaagctcctcctataaagttgtttcatcagtcttctggctcttagctaatgttaaagaaaacacatgattatcagggacttagagagtacattcatggtgaataaaattacaggggtgatataataaaaataatggcacccaattattttgatcctaggggagcccagggcatttttttttttttaaatttgaaacatgaacatattcttactgctaagctgctatcaccactactgtcctctgcctggtacttgtgttaaagatttagacttgtttgtgctccttgatgtccttttagaggaaactagtcatatctttgtaatgtaatttgctaacaaaattggctgtattgtatgttatctttcaactttaaaacaagtagaggaggttattgtctgagataaacttgctggatccaggtattcctggtagttaaagcccagaggtctttgttagctaggtatggaataccaggttcctacttaaggattcttgaatccaatggtattgtgtacagatagattttcaaataccaattcctttcttcccatcttcccaggctggtctgttggctgtgatggcccagctgggttgttacgtacctgctgagaagtgcaggctcacaccagttgacagagtgtttactaggcttggtgcctcagatagaataatgtcaggtgagttgcttttcctccacacaattttacaattcagttggcaaggataacctgccttttgttttaaacttgatgtaacaacatatatgcttttagtttaaattcttgctcatcattttcaaacaagatataatctgctcttaactcagttgtttctttttttaggagaaagcacattttttgttgagttgagtgaaactgctagcatactcaggcatgcaacagcacattctttggtacttgtggatgaattaggtaagacagattttgtttgaatgccattagggtggaaaacccatgtccccaatagctactgtttccccctctctggcggtcctgggatttcctgtcttgtctggtaggcaagagctgtactgctgagatgcagtctccataatcatttttatttaagactgctcatcagtcaagagcatgcatgcatctctgtaccatgtacatgcagtgcctgggggggggggggaaatggaagtcccgccctttcccttttttttttctcccttttggttgtgagacatggtttctctgcgtagccctggctgctctagagctcactttaatgtagagtgggctggctatgaactccgagatccacctttctctgtgcctcaggcagtgcctggctgggttcattgcttttaactgctgagcatttacacatttctggtgtggaagcatatgggggtcagcagatgctcagcatattgtatgtcgtatccaggccactgggctcctgctcatttctgacaataagtagacaaggttggcctttccccatgtactggggacctgttgcatgatgccactgagtgactggaagatcggtgttcccattctctgtacctgaattgtagatgtttattattgtcacaaggtgtacatctcttaatgtaacagtaattccacttccacaggaagaggcaccgcaacttttgatgggacagcgatagccaatgcggttgttaaagaacttgctgaaaccataaagtgtcgaacactgttttctacacactatcattcattagtagaagattattctaaaagtgtttgtgtgcgcctaggacatatggtatgtggaatcaaccagacatttttttcttttggcataaagtaaacagaactgtgataaaatgaacttttctttcttgaaggcatgcatggtagaaaatgaatgtgaggaccccagccaggagactattactttcctctataaattcattaagggagcttgtcctaagagctatggctttaatgcagcaaggcttgctaatctcccggaggaggttattcagaagggacacagaaaggcaagagaatttgagaggatgaatcagtcattacagctatttcggtaattatatcataatcttcctttaaagctgactttaaagacttggaaggctggtacagagacaaaatgaaatatttttttcctttttttaagggaagtttgtctggctactgaaaagccgactataaacggtgaagctatccataggctgctggccttgattaacggattgtagactacattggaagctgagctgacttttgaaaaaggtggtaaattcagacaacattatgatctaataaactttatttttaaaaaatgaccatttttccattttctttctaggaaattaaacccttttaattcttatctaccttctacataatggttattgaatactccacaatatattaagtctagatgttatggtacatgcatacactttcaggctgttatacccactgtcaccaatacacataaatggggggaggg

SEQ ID NO: 154 - protein, 558 aa, Rattus norvegicus
  Glypican
MELRARGWWLLCAAAALVACTRGDPASKSRSCSEVRQIYGAKGFSLSDVPQAEISGEHLRICPQGYTCCTSEMEENLANHSRMELETALHDSSRALQATLATQLHGIDDHFQRLLNDSERTLQDAFPGAFGDLYTQNTRAFRDLYAELRLYYRGANLHLEETLAEFWARLLERLFKQLHPQLLLPDDYLDCLGKQAEALRPFGDAPRELRLRATRAFVAARSFVQGLGVASDVVRKVAQVPLAPECSRAVMKLVYCAHCRGVPGARPCPDYCRNVLKGCLANQADLDAEWRNLLDSMVLITDKFWGPSGAEYVIGSVHMWLAEAINALQDNKDTLTAKVIQGCGNPKVNPHGSGPEEKRRRAKLALQEKSSTGTLEKLVSEAKAQLRDIQDYWISLPGTLCSEKMAMSPASDDRCWNGISKGRYLPEVMGDGLANQINNPEVEVDITKPDMTIRQQIMQLKIMTNRLRGAYGGNDVDFQDASDDGSGSGSGGGCPDDACGRRVSKKSSSSRTPLIHALPGLSEQEGQKTSAATRPEPHYFFLLFLFTLVLAAARPRWR

SEQ ID NO: 155 - DNA, 3509 bp, Rattus norvegicus
  Glypican
cgcccgcctgagtggccggacctcgcgcctcgcgcctcgcgtcccgcgctgcagccgcagtcggcttttgttgtctccgcctcctcgtcggtccccgactctggaccacgagcggcgcgcgctgggaccttggctctgcccttcgcgcagactgggctgagcgggccgggcggccatccagggaggcgcgcacgggcggtcggggagccgcgggccccgccatggagctccgggcccgaggctggtggctgctgtgcgcggccgccgcgctagtcgcctgcacccgcggggaccccgccagcaagagccggagctgcagcgaagtccgccagatctacggggctaagggctttagcctgagcgacgtgccccaggcagagatctcgggagagcacctgcggatctgcccccagggctacacctgctgcaccagtgagatggaggagaacctggccaaccacagccggatggagctggagaccgcactccacgacagcagccgtgccctgcaggctacactggccacccagctgcatggtatcgatgaccacttccagcgcctgctgaatgactcggagcgtacactgcaggatgcttttcccggggcctttggggacctgtacacgcagaacactcgggccttccgggacctgtatgctgagctgcgtctctactaccgaggggccaacctacaccttgaggagacactggccgagttctgggcacggctgctggagcgtctcttcaagcagctgcacccccagctgctgctgcccgatgactatctggactgcctgggcaagcaggcggaggcactgcggccgtttggggatgcccctcgagaactgcgcctgagggccacccgtgcttttgtggcggcacgatcctttgtgcagggcctgggtgtggccagtgacgtagtccgaaaggtggcccaggttcctctggccccagaatgttctcgggctgtcatgaagttggtctactgtgcccattgccggggagtccctggtgcccggccctgtcccgactattgccgaaatgtgctcaaaggctgccttgccaaccaggccgacctggatgccgagtggaggaacctcctggactccatggtgctcatcactgacaagttctggggcccgtcgggtgcggagtatgtcattggcagtgtgcatatgtggctggcggaggccatcaacgccctccaggacaacaaggacacactcacagctaaggtcatccagggctgcggaaaccccaaggtcaatccccatggctctgggcctgaggagaagcgtcgccgtgccaaactggcactgcaggagaagtcctccacaggtactctggaaaagctggtctctgaggccaaggcccagctccgagacattcaggactactggatcagcctcccagggacactgtgtagtgagaagatggccatgagtcctgccagcgatgaccgctgctggaatgggatttccaagggccggtacctacctgaggtgatgggtgatgggctggccaaccagatcaacaaccctgaagtggaggtggacatcaccaagccggatatgaccatccggcagcagatcatgcagctcaagatcatgaccaaccgtttacgtggcgcctacggtggaaatgatgtggacttccaggatgccagtgatgacggtagtggttccggcagcggtggcggatgcccagatgacgcctgtggtcggagggtcagcaagaagagctccagctcccggacccccttgatccatgccctccccggcttgtcagaacaggagggacagaagacctcggccgccactcgcccagagcctcactacttctttctgctcttcctgttcaccttggtccttgctgcagccaggcccaggtggcggtaactgccccctagcccaaaggactgtcttggccaaaacatgcaacagaccatatttacttcccttggccttcgaggcccagggcaggataaggagacagtagctctgagtgctggggcagggcgcatggggtcctggccttcctgggtctggccacgcctgtcaccctagcttctagttgttgtatcaggtcagctgcgagccagtgtccccaaaagccatgtttttcagggacctcaggggcacctctggctgcacactcctcccctaccctcctgtaccaccccagaagctcacgaggtcacccagaagggcggttattagctacaacccatcggagacctcaagtgagtctgtgtcttcctctcctgcctcttcccggtggggactccccaccagaccccatgggacacagatgtcagaaattgaggcccatcccgcagctccccaggaagcctggaagggatgccagtatgtcgctgaccaggctctggcagggcctacaagtttatgcatgataccttctcctcagaagaagctctgcaggcaggatcccaacacacaccagaccaggaccctgtgccactgtggagctcagtgaatctggttctcaaagaagacccactgtggggttcctctagtgtgacataggtgaggtggcagctggcaaggccgcactaggctgccacactgtttgccccctcagatgggctcataaagactgggcttgagggtccacatgaagagcctcacttcaggggaatagccggccacgtctagcccctatcccacttagaaaggtcacctggccacggtgatgctgggtggctgatgaaacttaagctcagggtcagtgggacctggcactgcaggtcaagaggacgcctgggccccttcctgacccaggcagctctgcaggagctgggggagcattgacagtcaagggcttttatagacatacacattcagaccctcggtgtccttgtccactgagtgctgtatctcatcgtatctcaatcttcattgacagcactggagaggctcggggcaccacttggagccttgtatcccgcaggcttgagacctgggggcacctggcttaccaaggttggcaaggctccatcttcccttccaggggcttggggatgctaagttgctgtatccaggaagacagtagtcctcacatgcagaaggcctgggaaaaggctgcttgtcgctttttttttttcctttctttttgtcactgggttagagaggctcccgccagcacagcaccaaggcctgcccagtagtcaggtctcctggtccaggatgggtgtgctctgtagttggtctgtgggtttcttaggcccatgccctgagcacattcacccagccacatccctgctagtgacactcaggcaggggcactgggaaccagacctgggctctggcatcaacgagtgcctaggtgtcaggacagcggcacccatcctgtacagggcagccaggatagtggccaagctactgtgtcctttctccatgaggctccctgtcactcggtgccagtgggtaatgtgtgttctttgagtccttatatgaataaaaggctggagacctaccaaaaaaaaaaaa

SEQ ID NO: 156 - protein, 394 aa, Mus musculus
  Cytoplasmic protein Ndr1
MSRELHDVDLAEVKPLVEKGESITGLLQEFDVQEQDIETLHGSLHVTLCGTPKGNRPVILTYHDIGMNHKTCYNPLFNSEDMQEITQHFAVCHVDAPGQQDGAPSFPVGYMYPSMDQLAEMLPGVLHQFGLKSVIGMGTGAGAYILTRFALNNPEMVEGLVLMNVNPCAEGWMDWAASKISGWTQALPDMVVSHLFGKEEIHNNVEVVHTYRQHILNDMNPSNLHLFISAYNSRRDLEIERPMPGTHTVTLQCPALLVVGDNSPAVDAVVECNSKLDPTKTTLLKMADCGGLPQISQPAKLAEAFKYFVQGMGYMPSASMTRLMRSRTASGSSVTSLEGTRSRSHTSEGPRSRSHTSEGSRSRSHTSEDARLNITPNSGATGNNAGPKSMEVSC

SEQ ID NO: 157 - DNA, 2905 bp, Mus musculus
  Cytoplasmic protein Ndr1
aaacaaaccttgccaggctaccctctcgcgttgcaggcagattgctcacccatcttcgtctctctcttcacctcccgcggggcgctgcacctccaaccttgtggttggctcctttccgtgcttgcttgctcattaggtgtgtgatagcacggaaatgtcccgagagctacatgacgtggacctcgctgaggtgaagcctctggtggaaaaaggggagagcatcactggtctcctgcaagagttcgatgttcaggagcaggatattgagaccctacatggctccctgcatgtcaccctgtgtgggacccccaagggcaaccgtcctgtcatcctcacgtatcacgacatcggcatgaaccacaagacctgctacaaccccctcttcaactctgaggacatgcaggagatcacacaacattttgctgtctgccatgtggatgcccctggccaacaggatggtgccccttccttcccagtggggtacatgtacccctcaatggatcagttggctgaaatgcttcctggagtccttcaccagtttgggctcaagagtgtcattggcatggggacaggagctggcgcctacatcctgacccgcttcgcactcaacaaccctgagatggtagagggtctcgtgctcatgaatgtgaacccctgtgctgaaggctggatggactgggctgcctctaagatctcaggatggacccaagccctgcctgacatggtggtgtcccacctcttcggcaaggaggagatacacaacaacgtggaggtagtgcacacgtaccgccagcacatcctcaacgacatgaacccgagcaacctacacttattcatcagcgcctacaacagccggagagacctggagattgagcggccaatgcctggaacccacactgtcactttgcagtgccctgctctgctggtagttggagacaactctcctgccgtggatgctgtggtggaatgcaattctaaattggacccaacgaagaccaccctgctcaagatggcagactgtggaggccttcctcagatctctcagcccgccaagcttgctgaggccttcaagtactttgtgcagggcatgggatacatgccttctgccagcatgactcgcctgatgcggtcccgcacagcctctggctccagtgtcacatccctggagggcacccgtagccgctcccataccagcgagggcccccgaagccgctcgcacaccagtgaggggtcccgtagccgctcccataccagtgaggatgcccgtctcaacatcacccccaactcgggtgccaccggaaacaatgccgggcccaagtccatggaggtgtcctgctaagcaatctgtgcatcagtcaccctggactggtggcctctcccttagcccccaacccttgcctgccaccctacgctaatgcggtattaatctaaagctgcttttgtaagaatgaactctggcggtggcagacccaggctgttctgactgcctcctgggaccagggtgggtggtggtggaccaaaggcaagaagcagttcagcgtactgttctgctaacaagtggcctggtggaccctctctctaccctcagacaccaaactgccaaaactaagaaatagatagctgtaacactgcctggctccaagcccaggctgatccagcattctggttcataggcgttttgccaacctgcctacttcctgtttcctccccactaaactcattcctggaaacaaacttctgttttgaaaggagagagagaggcaggaaagttgggcgccttattttaagtagagaaaccaagaaaggaagagaaaaaaaggcagggtctagggcaggtagaggaaaaacacaacaagtctactaggctcacttgaaggaattgattttaaagttctggacgctgaaacccacaacctgtttttctggcaaccttttaacgtgcaagaaaaactggtaacaaaccccaggctttatagagaaagtgatccagcaaatgtggggcatcagtgatttaagactcttgctatgcagtctactgtaccccgctcccattccacagtgaatgagtggatgacacctctgtccctcgggaagatggttttgatttgttgttgcattctttgaggcagagggagaacccagcaggtgacaggggtccttgtctgggatgagtctttaggatgggaagggtggggatagaatggccctgggattttgaggactcatggtagggccaagtgctagaacctggtgggtgtgatttcattgatctggaatcttgtgtgactgagtcacaccttgtctcccataattgatgtctggcattgatttgaaacttgatagctgaatgtctcttaactggccatcgctggttcttcagagagaaccgtatgttctagtgggggaaggactggttttgggttctgtacattccacgggaacttgcttccctctcctgcccctcctgctgactgggtttgtagcattggcctcttaagcaatgccagcctaatgcccatgctccatactactgccttttgattcttactgtggctaaccttgaacctttcctataggaaatgtgatcagatcagagacacttgatcgttgggagtcagccctcaaggcctggcgacttccaggatcttggagttgctagaggaaaagtagttatgccctataggcggcatgagagacaagggatcagtttacctgccaactcctaccgtggaggaggagttccactgaccttgtgtagaaagatcaggaatccaggccagggtgattgaatgctgacaagaaatcactgtatatgtctctccagggcagtttcttaataagatgtttgtatttatttccagaccaataaatttgtaactttgcccaaaaaaaaaaaaaaaaaaaa

SEQ ID NO: 158 - protein, 143 aa, Rattus norvegicus [sequence omitted]

SEQ ID NO: 159 - DNA, 506 bp, Rattus norvegicus
  Ribosomal protein S23
ctttctctcgggcccgtgcgccggcaagatgggtaagtgtcgtggtctccgtactgcccggaagctccgcagtcaccgacgggaccagaagtggcatgataagcagtacaagaaagcccacttgggcacagccctgaaggccaatccgtttgggggtgcctctcacgcaaagggaattgtgctggaaaaagtaggggttgaagccaaacagccaaattctgccatccggaagtgtgtcagggtgcagctcattaagaacggcaagaagatcacagcgttcgtgcccaatgacggttgcttgaacttcattgaggaaaatgatgaagttctggttgctggatttggtcgcaaaggccatgccgtgggtgatattcctggagtccgctttaaggtggttaaagtagccaatgtgtctcttttggctctgtacaaaggcaagaaggaaagaccaagatcataaaattttgacaatggaaacagaataataaattttatatccagaaaaa

SEQ ID NO: 160 - protein, 145 aa, Rattus norvegicus [sequence omitted]

SEQ ID NO: 161 - DNA, 487 bp, Rattus norvegicus
  Insulinoma rig
tttttcccagcagccgccaagatggccgaagtggagcagaagaaaaagcgaaccttccgcaagttcacctaccgtggcgtggacctcgaccagctgctggacatgtcctatgagcagctgatgcagttgtacagcgcccggcagagacggcgcctgaaccgaggcctgcggaggaagcagcactcactgctcaagcgcctgaggaaggccaagaaggaggcgccacccatggagaagccggaggtcgtgaagacccaccttagggacatgatcattctgcccgagatggtcggcagcatggtgggtgtgtacaacggcaagaccttcaaccaggtggagatcaaacccgagatgatcggccactacctgggcgagttctccatcacctacaagcctgtgaagcacggccggcccggcattggtgccacccactcctcccgatttatccccctcaagtagtggggacaataaagactcgttttcagcc

SEQ ID NO: 162 - protein, 226 aa, Rattus norvegicus
  CD9; cell surface protein
MPVKGGSKCIKYLLFGFNFIFWLAGIAVLAIGLWLRFDSQTKSIFEQETNHSSFYTGVYILIGAGALMMLVGFLGCCGAVQESQCMLGLFFGFLLVIFAIEIAAAVWGYTHKDEVIKELQEFYKDTYQKLRNKDEPQRETLKAIHMALNCCGIAGGVEQFISDICPKKQVLESFQVKSCPDAIDEVFHSKFHIIGAVGIGIAVVMIFGMIFSMILCCAIRRSREMV

SEQ ID NO: 163 - DNA, 678 bp, Rattus norvegicus
  CD9; cell surface protein
atgccggtcaaaggaggtagcaagtgcatcaaatacctgctctttggatttaacttcatcttctggctcgccggcatcgcagtgcttgccattggactatggctgcggttcgactctcagaccaagagcatcttcgagcaagaaactaatcattccagcttctacacaggagtgtacattctgattggagctggggccctcatgatgctagttggtttcctgggctgctgtggagctgtacaagagtcacagtgcatgctgggattgttcttcggattcctcttggtgatattcgccattgagatcgccgcagccgtctggggctatacccacaaggacgaggtgattaaagaactccaggagttttacaaggacacctaccaaaagttaaggaacaaggatgagccccagcgggaaacactcaaagccatccatatggcgttgaactgctgtggcatagctggtggtgtggagcagtttatctcggacatctgccccaaaaagcaggttctggaatccttccaggttaagtcctgcccggatgccatcgatgaggtcttccacagcaagttccacatcattggagcagtgggcatcggtatcgccgtggtgatgatcttcggtatgattttcagcatgattctgtgctgcgccatccgcaggagccgagaaatggtc

SEQ ID NO: 164 - protein, 379 aa, Rattus norvegicus
  Foocen-m2 reticulon
MEDIDQSSLVSSSTDSPPRPPPAFKYQFVTEPEDEEDEEEEEDEEEDDEDLEELEVLERKPAAGLSAAAVPPAAAAPLLDFSSDSVPPAPRGPLPAAPPAAPERQPSWERSPAAPAPSLPPAAAVLPSKLPEDDEPPARPPPPPPAGASPLAEPAAPPSTPAAPKRRGSGSVDETLFALPAASEPVIPSSAVVDLLYWRDIKKTGVVFGASLFLLLSLTVFSIVSVTAYIALALLSVTISFRIYKGVIQAIQKSDEGHPFRAYLESEVAISEELVQKYSNSALGHVNSTIKELRRLFLVDDLVDSLKFAVLMWVFTYVGALFNGLTLLILALISLFSIPVIYERHQVQIDHYLGLANKSVKDAMAKIQAKIPGLKRKAD

SEQ ID NO: 165 - DNA, 2782 bp, Rattus norvegicus
  Foocen-m2 reticulon
gccatggtaatcctgctcagtacgagaggaaccgcaggttcagacatttggtgtatgtgcttggctgaggagccaatggggcgaagctaccatctgtgggattatgactgaacgcctctaagtcagaatcccgcccaggcggaacgatacggcagcgccgaaggagcctcggttggccccggatagccggctccccgtccgtccccgtccggcgggtccccgcctcgtcgcccccccgggtgcggggcgggtccccccgccgggcgtcgggaccggggtccggtgcggagagccattcgtcccgggaaacggggtgcggccggaaagggggccgccctctcgcccgtcacgcttaacgcacgttcgtgtggaacctggcgctaaaccattcgtagacgacctgcttctgggtcggggtttcgtacgtagcagagcagctccctcgctgcgatctattgaaagcggcggcggcggctgcagcctgggacagggcgggtggcacatctcgatcgcgaaggcaggagaagcagtctcattgttccgggagccgtcgcctctgcaggttcttcggctcggctcggcacgactcggcctgcctggcccctgccagtcttgcccaacccccacaaccgcccgcgactctgaggagaagcggccctgcggcggctgtagctgcagcatcgtcggcgacccgccagccatggaagacatagaccagtcgtcgctggtctcctcgtccacggacagcccgccccggcctccgcccgccttcaagtaccagttcgtgacggagcccgaggacgaggaggacgaggaggaggaggaggacgaggaggaggacgacgaggacctagaggaactggaggtgctggagaggaagcccgcagccgggctgtccgcagctgcggtgccgcccgccgccgccgcgccgctgctggacttcagcagcgactcggtgccccccgcgccccgcgggccgctgccggccgcgccccctgccgctcctgagaggcagccatcctgggaacgcagccccgcggcgcccgcgccatccctgccgcccgctgccgcagtcctgccctccaagctcccagaggacgacgagcctccggcgaggcccccgcctccgccgccagccggcgcgagccccctggcggagcccgccgcgcccccttccacgccggccgcgcccaagcgcaggggctccggctcagtggatgagaccctttttgctcttcctgctgcatctgaacctgtgataccctcctctgcagttgttgacctcctctactggagagacattaagaagactggagtggtgtttggtgccagcttattcctgctgctgtctctgacagtgttcagcattgtcagtgtaacggcctacattgccttggccctgctctcggtgactatcagctttaggatatataagggcgtgatccaggctatccagaaatcagatgaaggccacccattcagggcatatttagaatctgaagttgctatatcagaggaattggttcagaaatacagtaattctgctcttggtcatgtgaacagcacaataaaagaactgaggcggcttttcttagttgatgatttagttgattccctgaagtttgcagtgttgatgtgggtgtttacttatgttggtgccttgttcaatggtctgacactactgattttagctctgatctcactcttcagtattcctgttatttatgaacggcatcaggtgcagatagatcattatctaggacttgcaaacaagagtgttaaggatgccatggccaaaatccaagcaaaaatccctggattgaagcgcaaagcagattgaaaaagccccaaacagaagttcatctttaaaggggacactcacttgattacgggggtgggagggtcaggggtgagcccttggtggccgtgcggtttcagctctttatttttagcagtgcactgtttgaggaaaaattacctgtcttgacttcctgtgtttatcatcttaagtattgtaagctgctgtgtatggatctcattgtagtcacacttgtcttccccaatgaggcgcctggtgaataaaggactcggggaaagctgtgcattgtatctgctgcagggtagtctagctgtatgcagagagttgtaaagaaggcaaatctgggggcagggaaaacccttttcacagtgtactgtgtttggtcagtgtaaaactgatgcagatttttctgaaatgaaatgtttagatgagagcatactactaaagcagagtggaaaactctgtctttatggtgtgttctaggtgtattgtgaatttactgttatattgccaatataagtaaatatagacctaatctatatatagtgtttcacaaagcttagatctttaaccttgcagctgccccacagtgcttgacctctgagtcattggttatgcagtgtagtcccaagcacataaactaggaagagaaatgtatttgtaggagtgctacctaccacctgttttcaagaaaatatagaactccaacaaaaatatagaatgtcatttcaaagacttactgtatgtatagttaattttgtcacagactctgaaattctatggactgaatttcatgcttccaaatgtttgcagttatcaaacattgttatgcaagaaatcataaaatgaagacttataccattgtggtttaagccgtactgaattatctgtggaatgcattgtgaactgtaaaagcaaagtatcaataaagcttatagacttaaaaaaaaaaaaaaaaaaaaa

SEQ ID NO: 166 - protein, 447 aa, Rattus norvegicus
  Clusterin
MKILLLCVALLLTWDNGMVLGEQEFSDNELQELSTQGSRYVNKEIQNAVQGVKHIKTLIEKTNAERKSLLNSLEEAKKKKEGALDDTRDSEMKLKAFPEVCNETMMALWEECKPCLKHTCMKFYARVCRSGSGLVGRQLEEFLNQSSPFYFWMNGDRIDSLLESDRQQSQVLDAMQDSFTRASGIIHTLFQDRFFTHEPQDIHHFSPMGFPHKRPHFLYPKSRLVRSLMPLSHYGPLSFHNMFQPFFDMIHQAQQAMDVQLHSPALQFPDVDFLKEGEDDPTVCKEIRHNSTGCLKMKGQCEKCQEILSVDCSTNNPAQANLRQELNDSLQVAERLTQQYNELLHSLQSKMLNTSSLLEQLNDQFTWVSQLANLTQGDDQYLRVSTVTTHSSDSEVPSRVTEVVVKLFDSDPITVVLPEEVSKDNPKFMDTVAEKALQEYRRKSRME

SEQ ID NO: 167 - DNA, 1857 bp, Rattus norvegicus
  Clusterin
ctcaagctcacactggctggacttcctcgccatgacagtctgtacctctaactgatcccagggatgataccacctacatttggggtggttcttctcgcctcagttaaacctctctgggagcaccatcacagacacccacagaagtttgttccctagatgattctaggtcctgtggagttgacaagattgaccatcacgctctcagcaatcgggtgaagtaaacaccaccgttgtctccatggaaatgcttaactacggcttgctagtaaggactccagactccaaagaggccacaccatgaagattctcctgctgtgtgtggcactgctgctgacctgggacaatggcatggtcctgggagagcaggagttctctgacaatgagctccaagaactgtccactcaaggaagtaggtatgttaataaggagattcagaacgccgtccagggggtgaagcacataaagaccctcatagaaaaaaccaacgcagagcgcaagtccctgctcaacagtttagaggaagccaaaaagaagaaagagggtgctctagatgacaccagggattctgaaatgaagctgaaggctttcccggaagtgtgtaacgagaccatgatggccctctgggaagagtgtaagccctgcctgaagcacacctgcatgaagttctacgcacgcgtctgcaggagcggctcggggctggttggtcgccagctagaggagtttctgaaccagagctcacccttctacttctggatgaacggggaccgcatcgactccctgctggagagtgaccggcagcagagccaagtcctagatgctatgcaggacagcttcactcgggcgtctggcatcatacatacgcttttccaggaccggttcttcacccatgagccccaggacatccaccatttctcccccatgggcttcccacacaagcggcctcatttcttgtaccccaagtcccgcttggtccgcagcctcatgcctctctcccactacgggcctctgagcttccacaacatgttccagcctttctttgatatgatacaccaggctcaacaggccatggacgtccagctccatagcccagctttacagttcccggatgtggatttcttaaaagaaggtgaagatgacccgacagtgtgcaaggagatccgccataactccacaggatgcctgaagatgaagggccagtgtgagaagtgccaagagatcttgtctgtggactgttcgaccaacaatcctgcccaggctaacctgcgccaggagctaaacgactcgctccaggtggctgagaggctgacccagcagtacaacgagctgcttcattccctccagtccaagatgctcaacacctcatccctgctggaacagctgaacgaccagttcacgtgggtgtcccagctggctaacctcacacagggcgatgaccagtaccttcgggtctccacagtgacaacccattcttctgactcagaagtcccctctcgtgtcactgaggtggtggtgaagctgtttgactctgaccccatcacagtggtgttaccagaagaagtctccaaggataaccctaagtttatggacacagtggcagagaaagcgctacaggaataccgcaggaaaagccgcatggaatgagacagaagcatcagttttctatatgtaggagtctcaaggagggaatctcccagctttccgaggttgctgcagacccctagagaactcacatgtctccagcgcctaggcctccaccccagcagcctctccttcctctgggttctgtactctaatgcctgcacttgatgctctgggaagaactgcttcccccacgcaactaatccaataaagcacctt

SEQ ID NO: 168 - protein, 374 aa, Homo sapiens
  Speckle-type protein
MSRVPSPPPPAEMSSGPVAESWCYTQIKVVKFSYMWTINNFSFCREEMGEVIKSSTFSSGANDKLKWCLRVNPKGLDEESKDYLSLYLLLVSCPKSEVRAKFKFSILNAKGEETKAMESQRAYRFVQGKDWGFKKFIRRDFLLDEANGLLPDDKLTLFCEVSVVQDSVNISGQNTMNMVKVPECRLADELGGLWENSRFTDCCLCVAGQEFQAHKAILAARSPVFSAMFEHEMEESKKNRVEINDVEPEVFKEMMCFIYTGKAPNLDKMADDLLAAADKYALERLKVMCEDALCSNLSVENAAEILILADLHSADQLKTQAVDFINYHASDVLETSGWKSMVVSHPHLVAEAYRSLASAQCPFLGPPRKRLKQS

SEQ ID NO: 169 - DNA, 1642 bp, Homo sapiens
  Speckle-type protein
gaatcggcggtcccgcaggtcccggatgttgcggacagtatgaggcaagcgcagggggacggggaccagcagctgtcgccgccgctctcagggtgaagagggaacagaaatctttgccccctgactttggaaatctcgtttaaccttcaaactggcgatgtcaagggttccaagtcctccacctccggcagaaatgtcgagtggccccgtagctgagagttggtgctacacacagatcaaggtagtgaaattctcctacatgtggaccatcaataactttagcttttgccgggaggaaatgggtgaagtcattaaaagttctacattttcatcaggagcaaatgataaactgaaatggtgtttgcgagtaaaccccaaagggttagatgaagaaagcaaagattacctgtcactttacctgttactggtcagctgtccaaagagtgaagttcgggcaaaattcaaattctccatcctgaatgccaagggagaagaaaccaaagctatggagagtcaacgggcatataggtttgtgcaaggcaaagactggggattcaagaaattcatccgtagagattttcttttggatgaggccaacgggcttctccctgatgacaagcttaccctcttctgcgaggtgagtgttgtgcaagattctgtcaacatttctggccagaataccatgaacatggtaaaggttcctgagtgccggctggcagatgagttaggaggactgtgggagaattcccggttcacagactgctgcttgtgtgttgccggccaggaattccaggctcacaaggctatcttagcagctcgttctccggtttttagtgccatgtttgaacatgaaatggaggagagcaaaaagaatcgagttgaaatcaatgatgtggagcctgaagtttttaaggaaatgatgtgcttcatttacacggggaaggctccaaacctcgacaaaatggctgatgatttgctggcagctgctgacaagtatgccctggagcgcttaaaggtcatgtgtgaggatgccctctgcagtaacctgtccgtggagaacgctgcagaaattctcatcctggccgacctccacagtgcagatcagttgaaaactcaggcagtggatttcatcaactatcatgcttcggatgtcttggagacctctgggtggaagtcaatggtggtgtcacatccccacttggtggctgaggcataccgctctctggcttcagcacagtgcccttttctgggacccccacgcaaacgcctgaagcaatcctaagatcctgcttgttgtaagactccgtttaatttccagaagcagcagccactgttgctgccactgaccaccaggtagacagcgcaatctgtggagcttttactctgttgtgaggggaagagactgcattgtggccccagacttttaaaacagcactaaataacttgggggaaacggggggagggaaaatgaaatgaaaaccctgttgctgcgtcactgtgttccctttggcctgtctgagtttgatactgtggggattcagtttaggcgctggcccgaggatatcccagcggtggtacttcggagacacctgtctgcatctgactgagcagaacaaatcgtcaggtgcctggagcaaaaagg

SEQ ID NO: 170 - protein, 47 aa, Homo sapiens
  OCP2
NEEKRTDAIPAWDQKFLKIDPGTLFEVILAANYLDIKGLLDVPCKTV

SEQ ID NO: 171 - DNA, 143 bp, Homo sapiens
  OCP2
agaatgaagaaaagcgaacagatgctatccctgcttgggaccaaaaattcctgaaaattgacccaggaacactttttgaagtcattttggctgcaaactacttagacatcaaaggtttgcttgatgttccatgcaagactgtt

SEQ ID NO: 172 - protein, 619 aa, Homo sapiens
  NS1 binding protein
MIPNGYLMFEDENFIESSVAKLNALRKSGQFCDVRLQVCGHEMLAHRAVLACCSPYLFEIFNSDSDPHGISHVKFDDLNPEAVEVLLNYAYTAQLKADKELVKDVYSAAKELKMDRVKQVCGDYLLSRMDVTSCISYRNFASCMGDSHLLNKVDAYIQEHLLQISEEEEFLKLPRLKLEVMLEDNVCLPSNGKLYTKVINWVQRSIWENGDSLEELMEEVQTLYYSADHKLLDGNLLDGQAEVFGSDDDHIQFVQKKPPRENGHKQISSSSTGCLSSPNATVQSPKHEWKIVASEKTSNNTYLCLAVLDGIFCVIFLHGRNSPQSSPTSTPKLSKSLSFEMQQDELIEKPMSPMQYARSGLGTAEMNGKLIAAGGYNREECLRTVECYNPHTDHWSFLAPMRTPRARFQMAVLMGQLYVVGGSNGHSDDLSCGEMYDSNIDDWIPVPELRTNRCNAGVCALNGKLYIVGGSDPYGQKGLKNCDVFDPVTKLWTSCAPLNIRRHQSAVCELGGYLYIIGGAESWNCLNTVERYNPENNTWTLIAPMNVARRGAGVAVLNGKLFVCGGFDGSHAISCVEMYDPTRNEWKMMGHMTSPRSNAGIATVGNTIYAVEDSMAMNF

SEQ ID NO: 173 - DNA, 2752 bp, Homo sapiens
  NS1 binding protein
agtgtctcccggtcgcgcgtggaggtcggtcgctcagagctgctgggcgcagtttctccgcctgctgcttcggcgcggctgtatcggcgagcgagcgagttcccgcgagttctcggtggcgctcccccttcctttcagtctccacggactggcccctcgtccttctacttgaccgctcccgtcttctgccgccttctggcgctttccgttgggccgattcccgcccgcttcctcctgcttcccatcgaagctctagaaatgaatgtttccatctcttcagagatgaaccagattatgatgcatcattatcacagaagaaattcgtgtctatagcttttaaggacttgattacatcattttcaagcctgatagttttggaatcaccattagagcttaagacacacctgccttcatttcaaccacctgtcttcataccctgacgaagtgcaccttttaacactcctttgtccttggattacttaagagttcccagaaatacatttgccaccaacagagtagccaaatttataaggaaaaatgattcccaatggatatttgatgtttgaggatgaaaattttattgagtcttctgttgccaaattaaatgccctgaggaaaagtggccagttctgtgatgttcgacttcaggtctgtggccatgaaatgttagcacacagagcagtgctagcttgctgcagtccctatttatttgaaatctttaatagtgatagtgatcctcatggaatttctcacgttaaatttgatgatctcaatccagaagctgttgaagtcttgttgaattatgcctacactgctcagttgaaagcagataaggaattggtaaaagatgtttattctgcagcaaaagagctgaagatggatcgagtaaagcaggtttgtggtgattatttactgtctagaatggatgttaccagctgcatctcttaccgaaattttgcaagttgtatgggagactcccatttgttgaataaggttgatgcttatattcaggagcatttgttacaaatttctgaagaggaggagtttcttaagcttccaaggctaaagttggaggtaatgcttgaagataatgtttgcttgcccagcaatggcaaattatatacaaaggtaatcaactgggtgcagcgtagcatctgggagaatggagacagtctggaagagctgatggaagaggttcaaaccttgtactactcagctgatcacaagctgcttgatgggaacctactagatggacaggctgaggtgtttggcagtgatgatgaccacattcagtttgtgcagaaaaagccaccacgtgagaatggccataagcagataagtagcagttcaactggatgtctctcttctccaaatgctacagtacaaagccctaagcatgagtggaaaatcgttgcttcagaaaagacttcaaataacacttacttgtgcctggctgtgctggatggtatattctgtgtcatttttcttcatgggagaaacagcccacagagctcaccaacaagtactccaaaactaagtaagagtttaagctttgagatgcaacaagatgagctaatcgaaaagcccatgtctcctatgcagtacgcacgatctggtctgggaacagcagagatgaatggcaaactcatagctgcaggtggctataacagagaggaatgtcttcgaacagtcgaatgctataatccacatacagatcactggtcctttcttgctcccatgagaacaccaagagcccgatttcaaatggctgtactcatgggccagctctatgtggtaggtggatcaaatggccactcagatgacctgagttgtggagagatgtatgattcaaacatagatgactggattcctgttccagaattgagaactaaccgttgtaatgcaggagtgtgtgctctgaatggaaagttatacatcgttggtggctctgatccatatggtcaaaaaggactgaaaaattgtgatgtatttgatcctgtaacaaagttgtggacaagctgtgcccctcttaacattcggagacaccagtctgcagtctgtgagcttggtggttatttgtacataatcggaggtgcagaatcttggaattgtctgaacacagtagaacgatacaatcctgaaaataatacctggactttaattgcacccatgaatgtggctaggcgaggagctggagtggctgttcttaatggaaaactgtttgtatgtggtggctttgatggttctcatgccatcagttgtgtggaaatgtatgatccaactagaaatgaatggaagatgatgggacatatgacttcaccaaggagcaatgctgggattgcaactgtagggaacaccatttatgcagtggaggattcgatggcaatgaatttctgaatacggcggaagtctataaccttgagtcaaatgaatggagcccctatacaaagattttccagttttaacgggtttaagaccctctcaaactaacaggcttagtgatgtaattatggttagcagaggtacacttgtgaataaagagggtgggtggggatagatgttgctaacagcaacacaaagcttttgcatattgcatactattaaacatgctgtacatactttttgggtttatttgggaaggaatgcaaagatgaaggtctgtttgtgtacttttaagactttggttattttactttttggaaaagataaaccaagaattgattgggcacatcaaaaaaaaaaaaaaaaaaaa

SEQ ID NO: 174 - protein, 451 aa, Rattus norvegicus
  Alpha-tubulin
MRECISIHVGQAGVQIGNACWELYCLEHGIQPDGQMPSDKTIGGGDDSFNTFFSETGAGKHVPRAVFVDLEPTVIDEVRTGTYRQLFHPEQLITGKEDAANNYARGHYTIGKEIIDLVLDRIRKLADQCTGLQGFLVFHSFGGGTGSGFTSLLMERLSVDYGKKSKLEFSIYPAPQVSTAVVEPYNSILTTHTTLEHSDCAFMVDNEAIYDICRRNLDIERPTYTNLNRLIGQIVSSITASLRFDGALNVDLTEFQTNLVPYPRIHFPLATYAPVISAEKAYHEQLSVAEITNACFEPANQMVKCDPRHGKYMACCLLYRGDVVPKDVNAAIATIKTKRTIQFVDWCPTGFKVGINYQPPTVVPGGDLAKVQRAVCMLSNTTAIAEAWARLDHKFDLMYAKRAFVHWYVGEGMEEGEFSEAREDMAALEKDYEEVGVDSVEGEGEEEGEEY

SEQ ID NO: 175 - DNA, 1617 bp, Rattus norvegicus
  Alpha-tubulin
gcgctgtaagaagcaacacctcctcctcgcctccgccatccacccggcagccgcgaagcagcaaccatgcgtgagtgtatctccatccacgtcggccaggctggtgtccagatcggcaatgcctgctgggagctctactgcctggaacatggcatccagcctgatggccagatgccaagcgacaagaccattgggggaggagatgactccttcaacaccttcttcagtgagacaggagctggcaagcacgtgccccgggcggtgttcgtagacctggaacccacagttattgatgaagttcgcactggcacctaccgccagctcttccacccagagcagctcatcacaggcaaggaagatgctgccaataactatgcccgtggccactacaccattggcaaggagatcattgaccttgtcttggacagaattcgcaagctggctgaccagtgcacgggtctccagggcttcttggttttccacagctttggtgggggaactggctctgggttcacctccctgctgatggagaggctctctgtcgactacggaaagaagtccaagctggagttctccatttacccagccccccaggtttccactgctgtggttgagccctacaattccatcctcaccacccacaccaccctggagcactctgattgtgccttcatggtagacaatgaggccatctatgacatctgtcgtagaaacctcgacattgagcgcccaacctacactaacttaaacaggttgataggtcaaattgtgtcttccatcactgcttccctcagatttgatggggccctgaatgttgatctgacagaattccagaccaacctggtgccctaccctcgcatccacttccctctggccacttatgcccctgtcatctctgctgagaaagcctaccatgaacagctttctgtagcagagatcaccaatgcctgctttgagccagccaaccagatggtgaaatgtgaccctcgccatggtaaatacatggcttgctgcctgctgtaccgtggtgatgtggtccccaaagatgtcaatgctgccattgccaccatcaagaccaagcgtaccatccagtttgtggactggtgccccactggcttcaaggttggcattaattaccagcctcccactgtggtccctggtggcgacctggccaaggtccagagagctgtgtgtatgctgagcaacaccacagccattgctgaggcctgggctcgcctggatcacaagtttgatctgatgtatgccaagcgtgcctttgtgcactggtacgtgggtgagggcatggaggagggagagttctctgaggcccgtgaggacatggctgccctagagaaggattatgaggaggttggtgtggattctgtggagggtgagggtgaggaagaaggagaggaatactaaattaaatgtcacaaggtgctgctttcacagggatgtttattctggtccaacatagaaagttgtgggctgatcagttaatttgtatgtggcaatgtgtgctttcatacagttactgactttaagtgtgaatgatttgtcagagacccgagccgtccacttcactgatgggttttaaataaaatactccctgtctta

SEQ ID NO: 176 - protein, 554 aa, Rattus sp.
  Prosaposin
MYALALLASLLVTALTSPVQDPKICSGGSAVVCRDVKTAVDCRAVKHCQQMVWSKPTAKSLPCDICKTVVTEAGNLLKDNATEEEILHYLEKTCAWIHDSSLSASCKEVVDSYLLVILDMIKGEMSNPGEVCSALNLCQSLQEYLAEQNQRQLESNKIPEVDLARVVAPFMSNIPLLLYPQDRPRSQPQPKANEDVCQDCMKLVTDIQTAVRTNSSFVQGLVDHVKEDCDRLGPGVSDICKNYVDQYSEVAVQMMMHMQPKEICVMVGFCDEVKRVPMRTLVPATEAIKNILPALELTDPYEQDVIQAQNVIFCQVCQLVMRKLSELIINNATEELLIKGLSKACSLLPAPASTKCQEVLVTFGPSLLDVLMHEVNPNFLCGVISLCSANPNLVGTLEQPAAAIVSALPKEPAPPKQPEEPKQSALRAHVPPQKNGGFCEVCKKLVIYLEHNLEKNSTKEEVLAALEKGCSFLPDPYQKQCDEFVAEYEPLLLEILVEVMDPSFVCSKIGVCPSAYKLLLGTEKCVRGPGYWCQNMETAARCNAVDHCKRHVWN

SEQ ID NO: 177 - DNA, 1737 bp, Rattus sp.
  Prosaposin
gcagcctgcggagtgaagcgcgccatgtatgctctcgctctcctcgccagccttctggtcaccgctctgaccagccctgtccaggacccgaagatctgctctgggggctcagcagtagtgtgcagagatgtgaagacggcggtggactgtagggctgtgaagcactgccagcagatggtctggagcaagcccacagcaaaatcccttccttgtgacatatgcaaaacggttgtcaccgaagctgggaacttgctgaaagataatgctactgaggaggagatcctccattacctggagaagacctgtgcgtggattcatgactccagcctgtcagcctcttgcaaggaggtggttgactcttacctgcttgtcatcctggacatgattaagggggagatgagcaaccccggggaagtgtgctctgcgctcaacctctgccagtcccttcaggagtacttggccgagcaaaaccagagacagctggagtccaacaagatcccggaggtggacctggcccgcgtggttgcccccttcatgtccaacatccctctcctgctgtaccctcaggatcggcctcgcagccagccgcagcccaaggctaacgaggacgtctgccaggactgtatgaagttggtgactgacatccagactgctgtgaggaccaactccagctttgtccagggcttggtggaccacgtcaaggaggattgtgaccgcctcgggccaggcgtgtctgacatatgcaagaactatgttgaccagtattctgaggtcgccgtccagatgatgatgcacatgcaacccaaggaaatctgtgtgatggttggcttctgtgatgaggtcaagagagtgccaatgaggactctggtccccgccactgaggccatcaagaatatcctccctgccctggagctgacggacccctatgagcaggatgtgatccaggcccaaaatgtgattttctgccaagtttgtcagcttgtgatgcgcaagttgtctgaactgattatcaacaatgccactgaggaacttctaattaaaggtttgagtaaagcctgctccctgctccctgctcctgcttcaaccaagtgccaggaagtgctggtaacatttggcccctccctgttggacgtcctcatgcatgaggtgaacccgaactttctgtgcggtgtgatcagcctctgttctgccaacccgaatttggtggggacccttgaacaacctgcagcagccattgtatctgcactgcccaaagagcctgcaccgccaaaacagcctgaagagcccaagcagtctgcattgcgcgcccatgtgcctcctcagaagaacggggggttctgtgaggtgtgcaagaagctggtcatctatttggaacataacctggagaaaaacagcaccaaggaggaggtcctggctgcacttgagaagggctgcagcttcctgcccgacccttaccagaagcagtgtgatgaatttgtggctgagtatgagcccttactgctggaaatccttgtggaggtgatggatccttcctttgtgtgctcgaaaattggagtctgcccttctgcctataagctgctgctgggaaccgagaagtgtgtccggggcccaggctactggtgtcagaacatggagactgctgcccgatgcaatgctgtcgatcattgcaaacgccatgtgtggaactagctttccagcttgcagaagtcgcctacttgtgggtctagggtaatgaag

1. Use of:
(a) an isolated gene sequence that is down-regulated in the spinal cord in response to streptozocin-induced diabetes;
(b) an isolated gene sequence comprising a nucleic acid sequence of Tables I to X.
(c) an isolated gene sequence having at least 80% sequence identity with a nucleic acid sequence of Tables I to X;
(d) an isolated nucleic acid sequence that is hybridizable to any of the gene sequences according to (a), (b) or (c) under stringent hybridisation conditions;
(e) a recombinant vector comprising a gene sequence or nucleic acid sequence according to any one of (a) to (d);
(f) a host cell containing the vector according to (e);
(g) a non-human animal having in its genome an introduced gene sequence or nucleic acid sequence or a removed or down-regulated gene sequence or nucleic acid sequence according to any one of (a) to (d);
(h) an isolated polypeptide comprising an amino acid sequence at least 90% identical to an amino acid sequence encoded by a nucleotide sequence according to any one of (a) to (d), or a polypeptide variant thereof with sequential amino acid deletions from the C terminus and/or the N-terminus; or
(i) an isolated polypeptide encoded by a nucleotide sequence according to any one of (a) to (d); or
(j) an isolated antibody that binds specifically to a polypeptide according to (h) or (i);
in the screening of compounds for the treatment of pain, or for the diagnosis of pain.

2. Use according to claim 1 wherein the isolated gene sequence encodes a kinase.

3. Use according to claim 1, wherein the isolated gene sequence encodes putative DNA dependent protein kinase catalytic subunit (D87521), putative cAMP-dependent protein kinase regulatory subunit RI alpha (AJ278429), putative protein tyrosine kinase t-Ror1 (U38894), diacylglycerol kinase (DGK-IV) (D78588; U51477) or elk protein tyrosine kinase (X13411).

4. Use according to claim 1 wherein the isolated gene sequence encodes a phosphatase.

5. Use according to claim 4, wherein the isolated gene sequence encodes an expression product or fragment thereof of PP-1 alpha for catalytic subunit of protein phosphatase type 1 alpha (D00859; U25809; X07848) or protein tyrosine phosphatase, striatum enriched (S49499, U28216, U27831).

6. Use according to claim 1 wherein the isolated gene sequence encodes an ion channel protein.

7. Use according to claim 6, wherein the isolated gene sequence encodes an expression product or fragment thereof of Na⁺, K⁺-ATPase alpha-subunit (D00189) or voltage dependent anion channel 2 (AF268468; U30838; L06328).

8. Use according to claim 1 wherein the isolated gene sequence encodes a receptor protein.

9. Use according to claim 8, wherein the isolated gene sequence encodes an expression product or fragment thereof of neonatal glycine receptor NglyR (X57281) or Syntaxin 13 (AF04458).

10. Use according to claim 1 wherein the isolated gene sequence encodes a transporter protein.

11. Use according to claim 10, wherein the isolated gene sequence encodes an expression product or fragment thereof of ATPase, calcium, plasma membrane, isoform 1 (J03753), calcium transporter CaT2 (AF209196), carnitine/acyl-carnitine carrier protein (X97831), putative potent brain type organic ion transporter (AB012808; ABO40056), UDP-galactose transporter (D87991) or choline transporter CHOT1 (X66494).

12. Use according to claim 1 wherein the isolated gene sequence encodes a G-protein coupled receptor protein.

13. Use according to claim 12, wherein the isolated gene sequence encodes an expression product or fragment thereof of rab GDI, alpha species, ras related GTPase (X74402).

14. Use according to claim 1 wherein the isolated gene sequence encodes a DNA binding protein.

15. Use according to claim 14, wherein the isolated gene sequence encodes an expression product or fragment thereof of histone, core, H2A.1 (M99065), putative signal transducer and regulator transcription 1 (Stat1) (U06924), transcription factor IIIC or alpha subunit (L28801).

16. Use according to claim 1 wherein the isolated gene sequence encodes a protease protein.

17. Use according to claim 16, wherein the isolated gene sequence encodes an expression product or fragment thereof of putative Lon protease (X76040).

18. Use according to claim 1 wherein the isolated gene sequence encodes a ligase, lyase, oxidoreductase or transferase.

19. Use according to claim 18, wherein the isolated gene sequence encodes an expression product or fragment thereof of GM3 synthase.

20. Use according to claim 18, wherein the isolated gene sequence encodes an expression product or fragment thereof of enolase, neuron-specific (M11931) or putative carbonic anhydrase XIV (AB005450).

21. Use according to claim 18, wherein the isolated gene sequence encodes an expression product or fragment thereof of cytosolic malate dehydrogenase (Mdh) (AF093773; M29462; D55654), heme-binding protein (HBP23) (D30035), squalene epoxidase (D37920) or superoxide dismutase, copper-zinc (SOD-1) (M21060; X05634; K00065).

22. Use according to claim 18, wherein the isolated gene sequence encodes an expression product or fragment thereof of aspartate aminotransferase, cytosolic (J04171), branched-chain aminotransferase, cytosolic, brain (AF165887), dihydrolipoamide succinyl-transferase (D90401), RNA polymerase II (AB017711), squalene synthetase, hepatic (M95591) or UDP-Gal: glucosylceramide beta-1,4-galactosyl transferase (AF048687).

23. A non-human animal having in its genome an introduced gene sequence or a removed or down-regulated gene sequence, said gene sequence being down-regulated in the spinal cord of a mammal in response to streptozocin-induced diabetes.

24. A non-human animal according to claim 23, wherein the introduced gene sequence encodes a kinase, a phosphatase, an ion channel protein, a receptor protein, a transporter protein, a G-protein coupled receptor, a DNA binding protein, a protease protein, a ligase, lyase, an oxidoreductase, or a hydrolase.

25. A non-human animal according to claim 23 which is C. elegans.

26. A kit comprising;
(a) affinity peptide and/or ligand and/or substrate for an expression product of a gene sequence that is down-regulated in the spinal cord of a mammal in response to streptozocin-induced diabetes; and
(b) a defined quantity of an expression product of a gene sequence that is down-regulated in the spinal cord of a mammal in response to streptozocin-induced diabetes, for simultaneous, separate or sequential use in detecting and/or quantifying down-regulation of a gene sequence in the spinal cord of a mammal in response to streptozocin-induced diabetes.

27. A kit according to claim 26, wherein the gene sequence encodes a kinase, a phosphatase, an ion channel protein, a receptor protein, a transporter protein, a G-protein coupled receptor, a DNA binding protein, a protease protein, a ligase, lyase, an oxidoreductase, or a hydrolase.

28. A kit comprising:
(a) nucleic acid sequences capable of hybridization to a nucleic acid sequence that is down-regulated in the spinal cord of a mammal in response to streptozocin-induced diabetes; and
(b) a defined quantity of one or more nucleic acid sequences capable of hybridization to a nucleic acid sequence that is down-regulated in the spinal cord of a mammal in response to streptozocin-induced diabetes, for simultaneous, separate or sequential use in detecting and/or quantifying down-regulation of a gene sequence in the spinal cord of a mammal in response to streptozocin-induced diabetes.

29. The kit of claim 28, wherein the gene sequence encodes a kinase, a phosphatase, an ion channel protein, a receptor protein, a transporter protein, a G-protein coupled receptor, a DNA binding protein, a protease protein, a ligase, lyase, an oxidoreductase, or a hydrolase.

30. A compound that modulates the action of an expression product of a gene sequence that is down-regulated in the spinal cord of a mammal in response to streptozocin-induced diabetes.

31. A compound according to claim 30 wherein the gene sequence is listed in Tables I to X.

32. A compound according to claim 30 encodes a kinase, a phosphatase, an ion channel protein, a receptor protein, a transporter protein, a G-protein coupled receptor, a DNA binding protein, a protease protein, a ligase, lyase, an oxidoreductase, or a hydrolase.

33. A compound according to claim 30 for use as a medicament.

34. A compound according to claim 30 for the treatment or diagnosis of pain.

35. A pharmaceutical composition comprising a compound according to claim 30 and a pharmaceutically acceptable carrier or diluent.

36. Use of a compound according to claim 30 in the manufacture of a medicament for the treatment or diagnosis of pain.

37. Use of a compound according to claim 30 in the manufacture of a medicament for the treatment or diagnosis of chronic pain.

38. A method of treatment of pain, which comprises administering to a patient an effective amount of a compound according to of claim 30.
